(19) United States
(12) Patent Application Publication
(10) Pub. No.: US 2016/0298096 A1
(43) Pub. Date: Oct. 13, 2016

(54) CRISPR-CAS SYSTEM MATERIALS AND METHODS

(71) Applicant: Crispr Therapeutics AG, Basel (CH)

(72) Inventors: Emmanuelle Charpentier, Braunschweig (DE); Krzysztof Chylinski, Vienna (AT); Ines Fontara, Braunschweig (DE)

(73) Assignee: Crispr Therapeutics AG, Basel (CH)

(21) Appl. No.: 15/037,371

(22) PCT Filed: Nov. 17, 2014
(86) PCT No.: PCT/EP2014/074813

§ 371 Date: May 18, 2016

Related U.S. Application Data
(60) Provisional application No. 61/905,835, filed on Nov. 18, 2013.

(51) Int. Cl. C12N 9/22; C12N 15/86; C12N 15/90

(52) U.S. Cl. CPC C12N 9/22; C12Y 301/00; C12N 15/907; C12N 15/86

(57) ABSTRACT

The invention relates to Type II CRIS-PR-Cas systems of Cas9 enzymes, guide RNAs and associated specific PAMs.

### FIELD OF THE INVENTION

[0001] The invention relates to type II CRISPR-Cas systems of Cas9 enzymes, guide RNAs and associated specific PAMs. This application claims the benefit of the filing date of U.S. Provisional Patent Application No. 61/905,835 filed Nov. 18, 2013, which is incorporated by reference herein in its entirety.

### INCORPORATION BY REFERENCE OF THE SEQUENCE LISTING

[0002] This application contains, as a separate part of disclosure, a Sequence Listing in computer-readable form (filename: 48128_SeqListing.txt; U.S. Pat. No. 7,869,256 bytes—ASCII text file; created Nov. 14, 2014) which is incorporated by reference herein in its entirety.

### BACKGROUND

[0003] Editing genomes using the RNA-guided DNA targeting principle of CRISPR-Cas (Clustered Regularly Interspaced Short Palindromic Repeats-CRISPR associated proteins) immunity has been exploited widely over the past few months (1-13). The main advantage provided by the bacterial type II CRISPR-Cas system lies in the minimal requirement for programmable DNA interference: an endonuclease, Cas9, guided by a customizable dual-RNA structure (14). As initially demonstrated in the original type II system of Streptococcus pyogenes, trans-activating CRISPR RNA (tracrRNA) (15,16) binds to the invariable repeats of precursor CRISPR RNA (pre-crRNA) forming a dual-RNA (14-17) that is essential for both RNA co-maturation by RNase III in the presence of Cas9 (15-17), and invading DNA cleavage by Cas9 (14,15,17-19). As demonstrated in Streptococcus, Cas9 guided by the duplex formed between mature activating tracrRNA and targeting crRNA (14-16) introduces site-specific double-stranded DNA (dsDNA) breaks in the invading cognate DNA (14,17-19). Cas9 is a multi-domain enzyme (14,20,21) that uses an HNH nuclease domain to cleave the target strand (defined as complementary to the spacer sequence of crRNA) and a RuvC-like domain to cleave the non-target strand (14,22,23), enabling the conversion of the dsDNA cleaving Cas9 into a nickase by selective motif inactivation (2,8,14,24,25). DNA cleavage specificity is determined by two parameters: the variable, spacer-derived sequence of crRNA targeting the protospacer sequence (a protospacer is defined as the sequence on the DNA target that is complementary to the spacer of crRNA) and a short sequence, the Protospacer Adjacent Motif (PAM), located immediately downstream of the protospacer on the non-target DNA strand (14,18,23,26-28).

[0004] Recent studies have demonstrated that RNA-guided Cas9 can be employed as an efficient genome editing tool in human cells (1,2,8,11), mice (9,10), zebrafish (6), drosophila (5), worms (4), plants (12,13), yeast (3) and bacteria (7). The system is versatile, enabling multiplex genome engineering by programming Cas9 to edit several sites in a genome simultaneously by simply using multiple guide RNAs (2,7,8,10). The easy conversion of Cas9 into a nickase was shown to facilitate homology-directed repair in mammalian genomes with reduced mutagenic activity (2,8,24,25). In addition, the DNA-binding activity of a Cas9 catalytic inactive mutant has been exploited to engineer RNA-programmable transcriptional silencing and activating devices (29,30).

[0005] To date, RNA-guided Cas9 from S. pyogenes, Streptococcus thermophilus, Neisseria meningitidis and Treponema denticola have been described as tools for genome manipulation (1-13,24,25,31-34 and Esvelt et al. PMID: 24076762).

### SUMMARY

[0006] The present invention expands the RNA-programmable Cas9 toolbox to additional orthologous systems. The diversity and interchangeability of dual-RNA:Cas9 in eight representatives of phylogenetically defined type II CRISPR-Cas groups was examined herein. The results of this work not only introduce a wider range of Cas9 enzymes, guide RNA structures and associated specific PAMs but also enlighten the evolutionary aspects of type II CRISPR-Cas systems, including coevolution and horizontal transfer of the system components.

[0007] In an aspect, the present disclosure provides guide RNAs, both single-molecule and double-molecule guide RNAs, as well as methods for manipulating DNA in a cell using the guide RNAs and/or DNAs (including vectors) encoding the guide RNAs. Complexes comprising the guide RNAs and Cas9 endonucleases are also provided

[0008] In some embodiments, the single-molecule guide RNAs comprise a DNA-targeting segment and a protein-binding segment, wherein the protein-binding segment comprises a tracrRNA set out in Supplementary Table S5 or wherein the protein-binding segment comprises a tracrRNA at least 80% identical over at least 20 nucleotides to a tracrRNA set out in Supplementary Table S5. In some embodiments, the protein-binding segment comprises a CRISPR repeat set out in Supplementary Table S5 that is the CRISPR repeat cognate to the tracrRNA of the protein-binding segment. In some embodiments, the DNA-targeting segment comprises RNA complementary to a protospacer-like sequence in a target DNA 5′ to a PAM sequence. In some embodiments, the tracrRNA and CRISPR repeat are respectively the C. jejuni tracrRNA and its cognate CRISPR repeat set out in Supplementary Table S5 and the PAM sequence is NNNNACA. In some embodiments, the tracrRNA and CRISPR repeat are respectively at least 80% identical to the C. jejuni tracrRNA and its cognate CRISPR repeat set out in Supplementary Table S5 and the PAM sequence is NNNNACA.

[0009] In some embodiments, the single-molecule guide RNA comprises a sequence that hybridizes to a protospacer-like sequence set out in one of SEQ ID NOs: 801-2701.

[0010] In another aspect, the disclosure provides a DNA encoding a single-molecule guide RNA of the invention.

[0011] In yet another aspect, the disclosure provides a vector comprising a DNA encoding a single-molecule guide RNA of the invention.

[0012] In still another aspect, the disclosure provides a cell comprising a DNA encoding a single-molecule guide RNA of the invention.

[0013] In an aspect, the disclosure provides a double-molecule guide RNA comprising: a targeter-RNA and an activator-RNA complementary thereto, wherein the activator-RNA comprises a tracrRNA set out in Supplementary Table S5 or wherein the activator-RNA comprises a tracrRNA at least 80% identical over at least 20 nucleotides to a tracrRNA set out in Supplementary Table S5. In some embodiments, the double-molecule guide RNA comprises a modified backbone, a non-natural internucleoside linkage, a nucleic acid mimetic, a modified sugar moiety, a base modification, a modification or sequence that provides for modified or regulated stability, a modification or sequence that provides for subcellular tracking, a modification or sequence that provides for tracking, or a modification or sequence that provides for a binding site for a protein or protein complex. In some embodiments, the targeter-RNA comprises a CRISPR repeat set out in Supplementary Table S5. In some embodiments, the targeter-RNA comprises a CRISPR repeat set out in Supplementary Table S5 that is the cognate CRISPR repeat of the tracrRNA of the activator-RNA. In some embodiments, the targeter-RNA further comprises RNA complementary to a protospacer-like sequence in a target DNA 5′ to a PAM sequence. In some embodiments, the tracrRNA and CRISPR repeat are respectively the C. jejuni tracrRNA and its cognate CRISPR repeat set out in Supplementary Table S5 and the PAM sequence is NNNNACA. In some embodiments, the tracrRNA and CRISPR repeat are at least 80% identical to respectively the C. jejuni tracrRNA and its cognate CRISPR repeat set out in Supplementary Table S5 and the PAM sequence is NNNNACA.

[0014] In some embodiments, the double-molecule guide RNA comprises a sequence that hybridizes to a protospacer-like sequence set out in one of SEQ ID NOs: 801-2701.

[0015] In another aspect, the disclosure provides a DNA encoding a double-molecule guide RNA of the invention.

[0016] In yet another aspect, the disclosure provides a vector comprising a DNA encoding a double-molecule guide RNA of the invention.

[0017] In still another aspect, the disclosure provides a cell comprising a DNA encoding a double-molecule guide RNA of the invention.

[0018] In an aspect, the disclosure provides methods for manipulating DNA in a cell, comprising contacting the DNA with a Cas9 ortholog-guideRNA complex, wherein the complex comprises: (a) a C. jejuni Cas9 endonuclease heterologous to the cell or an endonuclease with an activity portion at least 90% identical to the activity portion of the C. jejuni Cas9 endonuclease, and a guide RNA targeting the complex to a protospacer-like sequence in the DNA 5′ to the PAM sequence NNNNACA; (b) a P. multocida Cas9 endonuclease heterologous to the cell or an endonuclease with an activity portion at least 90% identical to the activity portion of the P. multocida Cas9 endonuclease, and a guide RNA targeting the complex to a protospacer-like sequence in the DNA 5′ to the PAM sequence GNNNCNNA or NNNNC; (c) an F. novicida Cas9 endonuclease heterologous to the cell or an endonuclease with an activity portion at least 90% identical to the activity portion of the F. novicida Cas9 endonuclease, and a guide RNA targeting the complex to a protospacer-like sequence in the DNA 5′ to the PAM sequence NG; (d) an S. thermophilus** Cas9 endonuclease heterologous to the cell or an endonuclease with an activity portion at least 90% identical to the activity portion of the S. thermophilus** Cas9 endonuclease, and a guide RNA targeting the complex to a protospacer-like sequence in the DNA 5′ to the PAM sequence NNAAAAW; (e) an L. innocua Cas9 endonuclease heterologous to the cell or an endonuclease with an activity portion at least 90% identical to the activity portion of the L. innocua Cas9 endonuclease, and a guide RNA targeting the complex to a protospacer-like sequence in the DNA 5′ to the PAM sequence NGG; or (f) an S. dysgalactiae Cas9 endonuclease heterologous to the cell or an endonuclease with an activity portion at least 90% identical to the activity portion of the S. dysgalactiae Cas9 endonuclease, and a guide RNA targeting the complex to a protospacer-like sequence in the DNA 5′ to the PAM sequence NGG. In some embodiments, the guide is a single-molecule guide RNA. In some embodiments, the guide RNA is a double-molecule guide RNA. The complexes used in the methods are also provided.

[0019] In some embodiments of the methods, the protospacer-like sequence targeted is in a CCR5, CXCR4, KRT5, KRT14, PLEC or COL7A1 gene. In some embodiments, the protospacer-like sequence is in a chronic granulomatous disease (CGD)-related gene CYBA, CYBB, NCF1, NCF2 or NCF4. In some embodiments, the protospacer-like sequence targeted is in a gene encoding B-cell lymphoma/leukemia IIA (BCL11A) protein, an erythroid enhancer of BCL11A or a BCL11A binding site. In some embodiments, the protospacer-like sequence targeted is up to 1000 nucleotides upstream of the above mentioned genes. In some embodiments of the methods, the guide RNA comprises a sequence complementary to a protospacer-like sequence set out in one of SEQ ID NOs: 801-2701.

[0020] In an aspect, the disclosure provides a recombinant vector encoding: (a) a guide RNA, wherein the guide RNA comprises a DNA-targeting segment complementary to a protospacer-like sequence in the DNA 5′ to the PAM sequence NNNNACA; and (b) a C. jejuni Cas9 endonuclease (for example, set out in SEQ ID NO: 50) or an endonuclease with an activity portion at least 90% identical to the activity portion of the C. jejuni Cas9 endonuclease. In some embodiments, the DNA-targeting segment complementary to the protospacer-like sequence is RNA complementary to the target sequences set out in one of SEQ ID NOs: 801-973, 1079-1222, 1313-1348, 1372-1415, 1444-1900, 2163-2482 or 2667-2686. Methods of using the vectors to manipulate DNA in a cell are also provided.

[0021] In another aspect, the disclosure provides a recombinant vector encoding: (a) a guide RNA, wherein the guide RNA comprises a DNA-targeting segment complementary to a protospacer-like sequence in the DNA 5′ to the PAM sequence GNNNCNNA or NNNNC; and (b) a P. multocida Cas9 endonuclease (for example, set out in SEQ ID NO: 1) or an endonuclease with an activity portion at least 90% identical to the activity portion of the P. multocida Cas9 endonuclease. In some embodiments, the DNA-targeting segment complementary to the protospacer-like sequence is RNA complementary to the target sequences set out in one of SEQ ID NOs:974-1078, 1223-1312, 1349-1371, 1416-1443, 1901-2162, 2483-2666 or 2687-2701. Methods of using the vectors to manipulate DNA in a cell are also provided.

[0022] In yet another aspect, the disclosure provides a recombinant vector encoding: (a) a guide RNA, wherein the guide RNA comprises a DNA-targeting segment complementary to a protospacer-like sequence in the DNA 5′ to the PAM sequence NG; and (b) a F. novicida Cas9 endonuclease (fore example, set out in SEQ ID NO: 43) or an endonuclease with an activity portion at least 90% identical to the activity portion of the F. novicida Cas9 endonuclease. Methods of using the vectors to manipulate DNA in a cell are also provided.

[0023] In still another aspect, the disclosure provides a recombinant vector encoding: (a) a guide RNA, wherein the guide RNA comprises a DNA-targeting segment complementary to a protospacer-like sequence in the DNA 5′ to the PAM sequence NNAAAAW; and (b) a S. thermophilus** Cas9 endonuclease or an endonuclease with an activity portion at least 90% identical to the activity portion of the S. thermophilus** Cas9 endonuclease. Methods of using the vectors to manipulate DNA in a cell are also provided.

[0024] In yet another aspect, the disclosure provides a recombinant vector encoding: (a) a guide RNA, wherein the guide RNA comprises a DNA-targeting segment complementary to a protospacer-like sequence in the DNA 5′ to the PAM sequence NGG; and (b) a L. innocua Cas9 endonuclease (for example, set out in SEQ ID NO: 3) or an endonuclease with an activity portion at least 90% identical to the activity portion of the L. innocua Cas9 endonuclease. Methods of using the vectors to manipulate DNA in a cell are also provided.

[0025] In still another aspect, the disclosure provides a recombinant vector encoding: (a) a guide RNA, wherein the guide RNA comprises a DNA-targeting segment complementary to a protospacer-like sequence in the DNA 5′ to the PAM sequence NGG; and (b) a S. dysgalactiae Cas9 endonuclease (for example, set out in SEQ ID NO: 105) or an endonuclease with an activity portion at least 90% identical to the activity portion of the S. dysgalactiae Cas9 endonuclease.

[0026] In some embodiments of the vectors, the guide RNA comprises a sequence complementary to a protospacer-like sequence set out in one of SEQ ID NOs: 801-2701.

[0027] In a related aspect, the disclosure provides a method comprising (a) identifying at least 7-20 bases of mammalian genomic DNA adjacent to any of the preceding protospacer-like sequences, and (b) manipulating the mammalian genomic DNA sequence by contacting a mammalian cell with, or administering to a mammal, (i) a DNA-targeting segment complementary to the DNA sequence identified in step (a) and (ii) a protein-binding segment, or nucleic acid(s) encoding (i) and (ii), and (iii) a cas9 endonuclease or a nucleic acid encoding said cas9 endonuclease; and (c) detecting cleavage of the mammalian genomic DNA.

[0028] In an aspect, the disclosure provides a modified Cas9 endonuclease, modified from any of the Cas9 orthologs disclosed herein, comprising one or more mutations corresponding to S. pyogenes Cas9 mutation E762A, HH983AA or D986A. In some embodiments, the modified Cas 9 endonuclease further comprises one or more mutations corresponding to S. pyogenes Cas9 mutation D10A, H840A, G12A, G17A, N854A, N863A, N982A or A984A.

[0029] In an aspect, the disclosure provides a method for manipulating DNA in a cell, comprising contacting the DNA with a Cas9 ortholog-guide RNA complex, wherein the complex comprises: (a) a Cas9 endonuclease heterologous to the cell and (b) a cognate guide RNA of the Cas9 endonuclease comprising a tracrRNA set out in Supplementary Table S5 or a guide RNA comprising a tracrRNA at least 80% identical to a cognate tracrRNA set out in Supplementary Table S5 over at least 20 nucleotides. In some embodiments, the guide is a single-molecule guide RNA. In some embodiments, the guide RNA is a double-molecule guide RNA. In some embodiments of the methods, the guide RNA comprises a sequence complementary to a protospacer-like sequence set out in one of SEQ ID NOs: 801-2701. Complexes used in the methods are also provided.

[0030] In an aspect, the disclosure provides a method for manipulating DNA in a cell, comprising contacting the DNA with a Cas9 ortholog-guide RNA complex, wherein the complex comprises: (a) a cognate guide RNA for a first Cas9 endonuclease from a cluster in Supplementary Table S2 and (b) a second Cas9 endonuclease from the same cluster that is exchangeable with preserved high cleavage efficiency with the first endonuclease and shares at least 80% identity with the first endonuclease over 80% of their length. In some embodiments, the guide is a single-molecule guide RNA. In some embodiments, the guide RNA is a double-molecule guide RNA. In some embodiments, the first Cas9 endonuclease is from S. pyogenes and the second Cas9 endonuclease is from S. mutans. In some embodiments, the first Cas9 endonuclease is from S. thermophilus* and the second Cas9 endonuclease is from S. mutans. In some embodiments, the first Cas9 endonuclease is from N. meningitidis and the second Cas9 endonuclease is from P. multocida. Complexes used in the methods are also provided.

[0031] In an aspect, the disclosure provides a method for manipulating DNA in a cell, comprising contacting the DNA with a Cas9 ortholog-guide RNA complex, wherein the complex comprises: (a) a cognate guide RNA of a first Cas9 endonuclease from a cluster in Supplementary Table S6 and (b) an Cas9 endonuclease from the same cluster in Supplementary Table S6 that is exchangeable with the same or lowered cleavage efficiency with the first endonuclease and shares at least 50% amino acid sequence identity with the first endonuclease over 70% of their length. In some embodiments, the guide is a single-molecule guide RNA. In some embodiments, the guide RNA is a double-molecule guide RNA. In some embodiments, the first Cas9 endonuclease is from C. Jejuni and the second Cas9 endonuclease is from P. multocida. In some embodiments, the first Cas9 endonuclease is from N. meningitidis and the second Cas9 endonuclease is from P. multocida. Complexes used in the methods are also provided.

[0032] In an aspect, the disclosure provides a method for manipulating DNA in a cell, comprising contacting the DNA with two or more Cas9-guide RNA complexes, wherein each Cas9-guideRNA complex comprises: (a) a Cas9 endonuclease from a different cluster in Supplementary Table S6 exhibiting less than 50% amino acid sequence identity with the other endonucleases of the method over 70% of their length, and (b) a guide RNA specifically complexed with each Cas9 endonuclease. In some embodiments, the guide is a single-molecule guide RNA. In some embodiments, the guide RNA is a double-molecule guide RNA. In some embodiments, the Cas9 endonucleases are from F. novicida and S. pyogenes. In some embodiments, the Cas9 endonucleases are from N. meningitidis and S. mutans. In some embodiments, the Cas9 endonucleases are the S. thermophilus* Cas9 and the S. thermophilus** Cas9. Complexes used in the methods are also provided.

[0033] In some embodiments of the manipulation methods, the DNA targeted in the cell is a CCR5, CXCR4, KRT5, KRT14, PLEC or COL7A1 gene. In some embodiments, the DNA targeted in the cell is a chronic granulomatous disease (CGD)-related gene CYBA, CYBB, NCF1, NCF2 or NCF4. In some embodiments, the protospacer-like sequence targeted is in a gene encoding B-cell lymphoma/leukemia IIA (BCL11A) protein, an erythroid enhancer of BCL11A or a BCL11A binding site. In some embodiments, the protospacer-like sequence targeted is up to 1000 nucleotides upstream of the above mentioned genes. In some embodiments of the methods, the guide RNA comprises a sequence complementary to a protospacer-like sequence set out in one of SEQ ID NOs: 801-2701.

[0034] It is contemplated that any of the methods provided herein may ex vivo or in vivo.

### BRIEF DESCRIPTION OF THE DRAWINGS

[0035] FIG. 1. Phylogeny of representative Cas9 orthologs and schematic representation of selected bacterial type II CRISPR-Cas systems. (A) Phylogenetic tree of Cas9 reconstructed from selected, informative positions of representative Cas9 orthologs multiple sequence alignment is shown (see Supplementary FIG. S2 and Supplementary Table S2). The Cas9 orthologs of the subtypes classified as II-A, II-B and II-C are highlighted with shaded boxes. The colored branches group distinct proteins of closely related loci with similar locus architecture (15). Each protein is represented by the GenInfo (GI) identifier followed by the bacterial strain name. The bootstrap values are given for each node (see Materials and Methods). Note that the monophyletic clusters of subtypes II-A and II-B are supported by high bootstrap values. The scale bar for the branch length is given as the estimated number of amino acid substitution per site. (B) Genetic loci of type II (Nmeni/CASS4) CRISPR-Cas in Streptococcus pyogenes SF370, Streptococcus mutans UA159, Streptococcus thermophilus LMD-9 *(CRISPR3), **(CRISPR1), Campylobacter jejuni NCTC 11168, Neisseria meningitidis Z2491, Pasteurella multocida Pm70 and Francisella novicida U112. Red arrow, transcription direction of tracrRNA; blue arrows, cas genes; black rectangles, CRISPR repeats; green diamonds, spacers; thick black line, leader sequence; black arrow, putative pre-crRNA promoter; HP, Hypothetical Protein. The colored bars represented on the left correspond to Cas9 tree branches colors. The transcription direction and putative leader position of C. jejuni and N. meningitidis pre-crRNAs were derived from previously published RNA sequencing data (15). The CRISPR-Cas locus architecture of P. multocida was predicted based on its close similarity to that of N. meningitidis and further confirmed by bioinformatics prediction of tracrRNA based on a strongly predicted promoter and a transcriptional terminator as described in (15). Type II CRISPR-Cas loci can differ in the cas gene composition, mostly with cas9, cas1 and cas2 being the minimal set of genes (type II-C, blue), sometimes accompanied with a fourth gene csn2a/b (type II-A, yellow and orange) or cas4 (type II-B, green). The CRISPR array can be transcribed in the same (type II-A, yellow and orange) or in the opposite (types II-B and C, blue and green) direction of the cas operon. The location of tracrRNA and the direction of its transcription differ within the groups (compare type II-A of S. thermophilus** with type II-A from the other species indicated here (yellow) and compare type II-C of C. jejuni with type II-C of N. meningitidis and P. multocida (blue)).

[0036] FIG. 2. RNase III is a general executioner of tracrRNA:pre-crRNA processing in type II CRISPR-Cas. Northern blot analysis of total RNA from S. pyogenes WT, Δmc and Δmc complemented with mc orthologs or mutants (truncated mc and inactivated (dead) (D51A) mc) probed for tracrRNA (top) and crRNA repeat (bottom). RNA sizes in nt and schematic representations of tracrRNA (red-black) and crRNA (green-black) are indicated on the right (16). The vertical black arrows indicate the processing sites. tracrRNA-171 nt and tracrRNA-89 nt forms correspond to primary tracrRNA transcripts. The presence of tracrRNA-75 nt and crRNA 39-42 nt forms indicates tracrRNA and pre-crRNA co-processing. S. pyogenes tracrRNA and pre-crRNA are co-processed by all analyzed RNase III orthologs. The truncated version and catalytic inactive mutant of S. pyogenes RNase III are both deficient in tracrRNA:pre-crRNA processing.

[0037] FIG. 3. Conserved motifs of Cas9 are required for DNA interference but not for dual-RNA processing by RNase III. (A) Schematic representation of S. pyogenes Cas9. The conserved HNH and splitted RuvC motifs and analyzed amino acids are indicated. (B) Northern blot analysis of total RNA from S. pyogenes WT, Δcas9 and Δcas9 complemented with pEC342 or pEC342 containing cas9 WT or mutant genes, probed for tracrRNA and crRNA repeat. Maturation of tracrRNA and pre-crRNA generating tracrRNA-75 nt and crRNA-39-42 nt forms is observed in all Δcas9 strains complemented with the cas9 mutants. (C) In vivo protospacer targeting. Transformation assays of S. pyogenes WT and Δcas9 with pEC85 (vector), pEC85Ωcas9 (cas9), pEC85ΩspeM (speM), and pEC85ΩtracrRNA-171 nt plasmids containing speM and cas9 mutants. The CFUs (colony forming units) per μg of plasmid DNA were determined in at least three independent experiments. The results+/−SD of technical triplicates of one representative experiment are shown. Cas9 N854A is the only mutant that did not tolerate the protospacer plasmid as observed for WT Cas9, indicating that this residue is not involved in DNA interference. (D) In vitro plasmid cleavage. Agarose gel electrophoresis of plasmid DNA (5 nM) containing speM protospacer (pEC287) incubated with 25 nM Cas9 WT or mutants in the presence of equimolar amounts of dual-RNA-speM (see Materials and Methods). Cas9 WT and N854A generated linear cleavage products while the other Cas9 mutants created only nicked products. M, 1 kb DNA ladder (Fermentas); oc: open circular, li: linear; sc: supercoiled.

[0038] FIG. 4. Cas9 from closely related CRISPR-Cas systems can substitute the role of S. pyogenes Cas9 in RNA processing by RNase III. (A) Schematic representation of Cas9 from selected bacterial species. The protein sizes and distances between conserved motifs (RuvC and HNH) are drawn in scale. See Supplementary FIG. S1. (B) Northern blot analysis of total RNA extracted from S. pyogenes WT, Δcas9 and Δcas9 complemented with pEC342 (backbone vector containing tracrRNA-171 nt and the cas operon promoter from S. pyogenes) or pEC342-based plasmids containing cas9 orthologous genes, probed for tracrRNA and crRNA repeat. Mature forms of S. pyogenes tracrRNA and pre-crRNA are observed only in the presence of S. pyogenes Cas9 WT or closely related Cas9 orthologs from S. mutans and S. thermophilus*.

[0039] FIG. 5. Cas9 orthologs cleave DNA in the presence of their cognate dual-RNA and specific PAM in vitro. (A) Logo plot of protospacer adjacent sequences derived from BLAST analysis of spacer sequences for selected bacterial species. The logo plot gives graphical representation of most abundant nucleotides downstream of the protospacer sequence. The numbers in brackets correspond to the number of analyzed protospacers. (B) DNA substrates designed for specific PAM verification. Based on the logo plot for each species, plasmid DNA substrates were designed to contain the speM protospacer and the indicated sequence downstream, either comprising (PAM+) or not (PAM−) the proposed PAM. The predicted PAMs were verified by cleavage assays narrowing down the necessary nucleotides for activity (data not shown); therefore the sequence used differs slightly from the logoplot shown in (A). The high abundance of other nucleotides not being part of the PAM can be explained by redundancy of the coding sequences containing the protospacers, and by the limited number of found protospacer targets. The last column shows the PAM sequence for each species, which was already published (no symbol) or derived from this work (#). (C) In vitro plasmid cleavage assays by dual-RNA:Cas9 orthologs on plasmid DNA with the 10 bp protospacer adjacent sequence (summarized in (B)). Each Cas9 ortholog in complex with its cognate dual-RNA cleaves plasmids containing the corresponding species-specific PAM (PAM+). No cleavage is observed with plasmids that did not contain the specific PAM (PAM−). li: linear cleavage product, sc: supercoiled plasmid DNA.

[0040] FIG. 6. Cas9 and dual-RNA co-evolved. (A) In vitro plasmid cleavage assays using S. pyogenes Cas9 in complex with orthologous dual-RNA (upper panel) and orthologous Cas9 enzymes in complex with S. pyogenes dual-RNA (lower panel). Plasmid DNA containing protospacer speM and S. pyogenes PAM (NGG) was incubated with different dual-RNAs in complex with S. pyogenes Cas9. tracrRNA and crRNA-repeat sequences of the dual-RNAs are from the indicated bacterial species, with crRNA spacer targeting speM. In the lower panel, plasmid DNA containing speM protospacer and the specific PAM was incubated with Cas9 orthologs in complex with S. pyogenes dual-RNA. S. pyogenes Cas9 can cleave plasmid DNA only in the presence of dual-RNA from S. pyogenes, S. mutans and S. thermophilus* (yellow). Dual-RNA from S. pyogenes can mediate DNA cleavage only with Cas9 from S. pyogenes, S. mutans and S. thermophilus* (yellow). li: linear cleavage product; sc: supercoiled plasmid DNA. (B) Summary of Cas9 and dual-RNA orthologs exchangeability. Specific PAM sequences were used according to FIG. 5. The color code reflects the type II CRISPR-Cas subgroups (FIG. 1). +++: 100-75% cleavage activity; ++: 75-50% cleavage activity; +: 50-25% cleavage activity; -: 25-0% cleavage activity observed under the conditions tested. Cas9 and dual-RNA duplexes from the same type II group can be interchanged and still mediate plasmid cleavage providing that the PAM sequence is specific for Cas9. See also Supplementary FIG. S10.

[0041] Supplementary FIG. S1. Biochemical characteristics and SDS-PAGE analysis of Cas9 proteins purified in this study. (A) Overview of characteristics of Cas9 orthologous proteins allote that the biochemical characteristics of S. pyogenes Cas9 WT and mutants are identical; ^{b}GenInfo (GI) Identifier; ^{c}ε, Extinction coefficient. (B) SDS PAGE analysis of purified mutants of Cas9 from S. pyogenes. (C) SDS PAGE analysis of purified Cas9 orthologs. M: PageRuler™ Unstained Protein Ladder (Thermo Scientific).

[0042] Supplementary FIG. S2. Multiple sequence alignment of representative Cas9 sequences (see Supplementary Table S2 and Material and Methods). The rows described as Jnet with following GI identifier of a selected Cas9 sequence provide the predicted secondary structure of Cas9 within the corresponding subgroups (sequences indicated below each Jnet). Conserved motifs are marked below the alignment and the mutated amino acid residues are highlighted. Asterisks indicate informative positions chosen for the Cas9 tree reconstruction.

[0043] Supplementary FIG. S3. Multiple sequence alignment of representative Cas1 sequences (see Supplementary Table S2 and Materials and Methods). Informative positions chosen for the Cas1 tree reconstruction are marked with asterisks at the bottom of the alignment.

[0044] Supplementary FIG. S4. Phylogenetic analysis of representative Cas9 and Cas1 sequences. Phylogenetic trees of Cas1 (left) and Cas9 (right) reconstructed from selected, informative positions of Cas1 and Cas9 multiple sequence alignments are shown (see FIG. 1 and Supplementary FIG. S2 and S3). The Cas1 tree is rooted to the outgroup of selected Cas1 orthologs of type I CRISPR-Cas systems. The Cas1 and Cas9 orthologs of the types classified as II-A, II-B and II-C are highlighted with shaded boxes. The same branch colors were used for each bacterial strain on both trees. Each protein is represented by the GenInfo (GI) identifier followed by the bacterial strain name. The bootstrap values are given for each node (see Materials and Methods). The scale bars for the branch length are given as the estimated number of amino acid substitution per site. Note the similarity of the trees topology and monophyletic clusters of subtypes II-A and II-B on both trees supported by high bootstrap values.

[0045] Supplementary FIG. S5. RNase III is a general executioner of tracrRNA:pre-crRNA processing in type II CRISPR-Cas. Northern blot analysis of total RNA from S. pyogenes WT, Δrnc and Δrnc complemented with mc orthologs or mc mutants probed with (A) tracrRNA and (B) crRNA repeat (Supplementary Table S1). The dashed-line boxes represented below the Northern blots in (B) show the area of the blots with enhanced exposure. All RNAse III orthologs can co-process S. pyogenes tracrRNA and pre-crRNA. No mature forms of tracrRNA and crRNAs could be observed in Δrnc complemented with the truncated version or catalytically inactive (dead) mutant of RNase IIII.

[0046] Supplementary FIG. S6. Multiple sequence alignment of bacterial endoribonucleases III used in the study. Domains indicated below the alignment are according to the domains identified in RNase III from E. coli (58, 59). The conserved catalytic aspartate residue mutated in the catalytically inactive “mc dead” mutant and the last amino acid of the truncated mc mutant are indicated above the alignment with an asterisk and an arrow, respectively.

[0047] Supplementary FIG. S7. Conserved catalytic amino acid residues of Cas9 are not involved in dual-RNA processing by RNase III. Northern blot analysis of total RNA extracted from S. pyogenes WT, Δcas9 and Δcas9 complemented with pEC342 (backbone vector containing tracrRNA-171 nt and the native cas operon promoter from S. pyogenes) or pEC342-derived plasmids encoding Cas9 WT or mutants, hybridized with (A) tracrRNA or (B) crRNA repeat probe (Supplementary Table S1). tracrRNA:crRNA co-processing is observed in all strains encoding Cas9 point mutants. Note that in a previous study, we observed low abundance of tracrRNA in the cas9 deletion mutant (16). For this reason, plasmids used in cas9 complementation studies were designed to encode tracrRNA in addition to cas9.

[0048] Supplementary FIG. S8. Cas9 and tracrRNA:crRNA co-evolved. Northern blot analysis of total RNA extracted from S. pyogenes WT, Δcas9 and Δcas9 complemented with pEC342 or pEC342-derived plasmids encoding Cas9 WT or mutants—hybridized with (A) tracrRNA or (B) crRNA repeat probe (Supplementary Table S1). Only S. pyogenes Cas9 WT and closely related Cas9 orthologs from S. mutans and S. thermophilus* (CRISPR3) can contribute to coprocessing of S. pyogenes tracrRNA:pre-crRNA.

[0049] Supplementary FIG. S9. Cas9 orthologs cleave plasmid DNA in the presence of their cognate dual-RNA and specific PAM. Agarose gel electrophoresis analysis of dual-RNA:Cas9 titration (0-100 nM dual-RNA-Cas9 complex) on plasmid DNA (5 nM) containing speM protospacer and adjacent WT PAM (PAM+), imperfect PAM (PAM±) or no PAM (PAM−). For S. pyogenes, S. mutans, S. thermophilus*, S. thermophilus** and N. meningitidis, the PAM sequence has already been published (27,28,53,54). For the other bacterial species, PAMs were predicted based on the downstream sequence of protospacer identified in the investigated or related strains (see Supplementary Table S2 and Materials and Methods). The 10 bp sequence located directly downstream of the crRNA-targeted speM protospacer is shown. The nucleotide(s) predicted to belong to the PAM sequence are shaded in grey. li: linear cleavage product, sc: supercoiled plasmid DNA, M: 1 kb DNA ladder.

[0050] Supplementary FIG. S10. Summary of in vitro plasmid cleavage assays of Cas9 orthologs in combination with dual-RNAs. Agarose gel electrophoresis of cleavage assays. (A) S. mutans Cas9 (50 nM), (B) S. thermophilus* Cas9 (25 nM), (C) S. thermophilus** Cas9 (100 nM), (D) C. jejuni Cas9 (100 nM), (E) N. meningitidis Cas9 (100 nM), (F) P. multocida Cas9 (25 nM), (G) F. novicida Cas9 (100 nM) in complex with equimolar concentrations of each of the dual-RNA orthologs were incubated with plasmid DNA (5 nM) containing speM protospacer sequence and the PAM sequence specific to the Cas9 ortholog analyzed. li: linear cleavage product, sc: supercoiled plasmid DNA, M: 1 kb DNA ladder.

[0051] Supplementary FIG. S11. Cas9 tree topology suggests both horizontal and vertical transfer of type II CRISPR-Cas systems. See FIG. 1, Supplementary FIG. S4 and Supplementary Table S4. The codes for taxonomy (phyla in color) and habitat (symbols) of the bacterial strains harbouring representative Cas9 orthologs are indicated (right panel). The clusters grouping evolutionary distant bacteria (1 and 3) but isolated mainly from similar sources (human for cluster 1 and mostly environmental samples for cluster 3) suggest horizontal transfer of type II systems. Clusters 2, 4 and 5 group closely related bacteria isolated from diverse habitats indicating vertical transfer of the systems.

[0052] Supplementary FIG. S12. tracrRNA:crRNA repeat duplexes form similar secondary structures in loci with closely related Cas9 orthologs. Antirepeat sequence of processed tracrRNA (red) and repeat-derived sequence of mature crRNA (grey) were co-folded for each type II CRISPR-Cas locus studied (see Materials and Methods). Color bars indicated on the left group dual-RNAs from loci with closely related Cas9 (see FIG. 1 and Supplementary FIG. S4). RNA duplexes belonging to the same groups display structural similarities, suggesting a role of the structure in dual-RNA recognition by Cas9.

### DETAILED DESCRIPTION

### Terminology

[0053] All technical and scientific terms used herein have the same meaning as commonly understood by one of ordinary skill in the art to which this invention belongs, unless the technical or scientific term is defined differently herein.

[0054] The terms “polynucleotide” and “nucleic acid,” used interchangeably herein, refer to a polymeric form of nucleotides of any length, either ribonucleotides or deoxyribonucleotides. Thus, this term includes, but is not limited to, single-, double-, or multi-stranded DNA or RNA, genomic DNA, cDNA, DNA-RNA hybrids, or a polymer comprising purine and pyrimidine bases or other natural, chemically or biochemically modified, non-natural, or derivatized nucleotide bases. “Oligonucleotide” generally refers to polynucleotides of between about 5 and about 100 nucleotides of single- or double-stranded DNA. However, for the purposes of this disclosure, there is no upper limit to the length of an oligonucleotide. Oligonucleotides are also known as “oligomers” or “oligos” and may be isolated from genes, or chemically synthesized by methods known in the art. The terms “polynucleotide” and “nucleic acid” should be understood to include, as applicable to the embodiments being described, single-stranded (such as sense or antisense) and double-stranded polynucleotides.

[0055] “Genomic DNA” refers to the DNA of a genome of an organism including, but not limited to, the DNA of the genome of a bacterium, fungus, archea, plant or animal.

[0056] “Manipulating” DNA encompasses binding, nicking one strand, or cleaving (i.e., cutting) both strands of the DNA, or encompasses modifying the DNA or a polypeptide associated with the DNA (e.g., the modifications of paragraphs [00161] or [00162]). Manipulating DNA can silence, activate, or modulate (either increase or decrease) the expression of an RNA or polypeptide encoded by the DNA.

[0057] A “stem-loop structure” refers to a nucleic acid having a secondary structure that includes a region of nucleotides which are known or predicted to form a double strand (stem portion) that is linked on one side by a region of predominantly single-stranded nucleotides (loop portion). The terms “hairpin” and “fold-back” structures are also used herein to refer to stem-loop structures. Such structures are well known in the art and these terms are used consistently with their known meanings in the art. As is known in the art, a stem-loop structure does not require exact base-pairing. Thus, the stem may include one or more base mismatches. Alternatively, the base-pairing may be exact, i.e. not include any mismatches.

[0058] By “hybridizable” or “complementary” or “substantially complementary” it is meant that a nucleic acid (e.g. RNA) comprises a sequence of nucleotides that enables it to non-covalently bind, i.e. form Watson-Crick base pairs and/or G/U base pairs, “anneal”, or “hybridize,” to another nucleic acid in a sequence-specific, antiparallel, manner (i.e., a nucleic acid specifically binds to a complementary nucleic acid) under the appropriate in vitro and/or in vivo conditions of temperature and solution ionic strength. As is known in the art, standard Watson-Crick base-pairing includes: adenine (A) pairing with thymidine (T), adenine (A) pairing with uracil (U), and guanine (G) pairing with cytosine (C) [DNA, RNA]. In addition, it is also known in the art that for hybridization between two RNA molecules (e.g., dsRNA), guanine (G) base pairs with uracil (U). For example, G/U base-pairing is partially responsible for the degeneracy (i.e., redundancy) of the genetic code in the context of tRNA anti-codon base-pairing with codons in mRNA. In the context of this disclosure, a guanine (G) of a protein-binding segment (dsRNA duplex) of a guide RNA molecule is considered complementary to a uracil (U), and vice versa. As such, when a G/U base-pair can be made at a given nucleotide position a protein-binding segment (dsRNA duplex) of a guide RNA molecule, the position is not considered to be non-complementary, but is instead considered to be complementary.

[0059] Hybridization and washing conditions are well known and exemplified in Sambrook, J., Fritsch, E. F. and Maniatis, T. Molecular Cloning: A Laboratory Manual, Second Edition, Cold Spring Harbor Laboratory Press, Cold Spring Harbor (1989), particularly Chapter 11 and Table 11.1 therein; and Sambrook, J. and Russell, W., Molecular Cloning: A Laboratory Manual, Third Edition, Cold Spring Harbor Laboratory Press, Cold Spring Harbor (2001). The conditions of temperature and ionic strength determine the “stringency” of the hybridization.

[0060] Hybridization requires that the two nucleic acids contain complementary sequences, although mismatches between bases are possible. The conditions appropriate for hybridization between two nucleic acids depend on the length of the nucleic acids and the degree of complementation, variables well known in the art. The greater the degree of complementation between two nucleotide sequences, the greater the value of the melting temperature (Tm) for hybrids of nucleic acids having those sequences. For hybridizations between nucleic acids with short stretches of complementarity (e.g. complementarity over 35 or less, 30 or less, 25 or less, 22 or less, 20 or less, or 18 or less nucleotides) the position of mismatches becomes important (see Sambrook et al., supra, 11.7-11.8). Typically, the length for a hybridizable nucleic acid is at least about 10 nucleotides. Illustrative minimum lengths for a hybridizable nucleic acid are: at least about 15 nucleotides; at least about 20 nucleotides; at least about 22 nucleotides; at least about 25 nucleotides; and at least about 30 nucleotides). Furthermore, the skilled artisan will recognize that the temperature and wash solution salt concentration may be adjusted as necessary according to factors such as length of the region of complementation and the degree of complementation.

[0061] It is understood in the art that the sequence of polynucleotide need not be 100% complementary to that of its target nucleic acid to be specifically hybridizable or hybridizable. Moreover, a polynucleotide may hybridize over one or more segments such that intervening or adjacent segments are not involved in the hybridization event (e.g., a loop structure or hairpin structure). A polynucleotide can comprise at least 70%, at least 80%, at least 90%, at least 95%, at least 99%, or 100% sequence complementarity to a target region within the target nucleic acid sequence to which they are targeted. For example, an antisense nucleic acid in which 18 of 20 nucleotides of the antisense compound are complementary to a target region, and would therefore specifically hybridize, would represent 90 percent complementarity. In this example, the remaining noncomplementary nucleotides may be clustered or interspersed with complementary nucleotides and need not be contiguous to each other or to complementary nucleotides. Percent complementarity between particular stretches of nucleic acid sequences within nucleic acids can be determined routinely using BLAST programs (basic local alignment search tools) and PowerBLAST programs known in the art (Altschul et al., J. Mol. Biol., 1990, 215, 403-410; Zhang and Madden, Genome Res., 1997, 7, 649-656) or by using the Gap program (Wisconsin Sequence Analysis Package, Version 8 for Unix, Genetics Computer Group, University Research Park, Madison Wis.), using default settings, which uses the algorithm of Smith and Waterman (Adv. Appl. Math., 1981, 2, 482-489).

[0062] The terms “peptide,” “polypeptide,” and “protein” are used interchangeably herein, and refer to a polymeric form of amino acids of any length, which can include coded and non-coded amino acids, chemically or biochemically modified or derivatized amino acids, and polypeptides having modified peptide backbones.

[0063] “Binding” as used herein (e.g. with reference to an RNA-binding domain of a polypeptide) refers to a non-covalent interaction between macromolecules (e.g., between a protein and a nucleic acid). While in a state of non-covalent interaction, the macromolecules are said to be “associated” or “interacting” or “binding” (e.g., when a molecule X is said to interact with a molecule Y, it is meant the molecule X binds to molecule Y in a non-covalent manner). Not all components of a binding interaction need be sequence-specific (e.g., contacts with phosphate residues in a DNA backbone), but some portions of a binding interaction may be sequence-specific. Binding interactions are generally characterized by a dissociation constant (K_{d}) of less than 10⁻⁶ M, less than 10⁻⁷ M, less than 10⁻⁸ M, less than 10⁻⁹ M, less than 10⁻¹⁰M, less than 10⁻¹¹ M, less than 10⁻¹² M, less than 10⁻¹³ M, less than 10⁻¹⁴ M, or less than 10⁻¹⁵ M. “Affinity” refers to the strength of binding, increased binding affinity being correlated with a lower K_{d}. By “binding domain” it is meant a protein domain that is able to bind non-covalently to another molecule. A binding domain can bind to, for example, a DNA molecule (a DNA-binding protein), an RNA molecule (an RNA-binding protein) and/or a protein molecule (a protein-binding protein). In the case of a protein domain-binding protein, it can bind to itself (to form homodimers, homotrimers, etc.) and/or it can bind to one or more molecules of a different protein or proteins.

[0064] The term “conservative amino acid substitution” refers to the interchangeability in proteins of amino acid residues having similar side chains. For example, a group of amino acids having aliphatic side chains consists of glycine, alanine, valine, leucine, and isoleucine; a group of amino acids having aliphatic-hydroxyl side chains consists of serine and threonine; a group of amino acids having amide containing side chains consisting of asparagine and glutamine; a group of amino acids having aromatic side chains consists of phenylalanine, tyrosine, and tryptophan; a group of amino acids having basic side chains consists of lysine, arginine, and histidine; a group of amino acids having acidic side chains consists of glutamate and aspartate; and a group of amino acids having sulfur containing side chains consists of cysteine and methionine. Exemplary conservative amino acid substitution groups are: valine-leucine-isoleucine, phenylalanine-tyrosine, lysine-arginine, alanine-valine, and asparagine-glutamine.

[0065] A polynucleotide or polypeptide has a certain percent “sequence identity” to another polynucleotide or polypeptide, meaning that, when aligned, that percentage of bases or amino acids are the same, and in the same relative position, when comparing the two sequences. Sequence identity can be determined in a number of different manners. To determine sequence identity, sequences can be aligned using various methods and computer programs (e.g., BLAST, T-COFFEE, MUSCLE, MAFFT, etc.), available over the world wide web at sites including ncbi.nlm.nili.gov/BLAST, ebi.ac.uk/Tools/msa/tcoffee/, ebi.ac.uk/Tools/msa/muscle/, mafft.cbrc.jp/alignment/software/. See, e.g., Altschul et al. (1990), J. Mol. Bioi. 215:403-10. Sequence alignments standard in the art are used according to the invention to determine amino acid residues in a Cas9 ortholog that “correspond to” amino acid residues in another Cas9 ortholog. The amino acid residues of Cas9 orthologs that correspond to amino acid residues of other Cas9 orthologs appear at the same position in alignments of the sequences.

[0066] A DNA sequence that “encodes” a particular RNA is a DNA nucleic acid sequence that is transcribed into RNA. A DNA polynucleotide may encode an RNA (mRNA) that is translated into protein, or a DNA polynucleotide may encode an RNA that is not translated into protein (e.g. tRNA, rRNA, or a guide RNA; also called “non-coding” RNA or “ncRNA”). A “protein coding sequence or a sequence that encodes a particular protein or polypeptide, is a nucleic acid sequence that is transcribed into mRNA (in the case of DNA) and is translated (in the case of mRNA) into a polypeptide in vitro or in vivo when placed under the control of appropriate regulatory sequences. The boundaries of the coding sequence are determined by a start codon at the 5′ terminus (N-terminus) and a translation stop nonsense codon at the 3′ terminus (C-terminus). A coding sequence can include, but is not limited to, cDNA from prokaryotic or eukaryotic mRNA, genomic DNA sequences from prokaryotic or eukaryotic DNA, and synthetic nucleic acids. A transcription termination sequence will usually be located 3′ to the coding sequence.

[0067] As used herein, a “promoter sequence” is a DNA regulatory region capable of binding RNA polymerase and initiating transcription of a downstream (3′ direction) coding or non-coding sequence. For purposes of defining the present invention, the promoter sequence is bounded at its 3′ terminus by the transcription initiation site and extends upstream (5′ direction) to include the minimum number of bases or elements necessary to initiate transcription at levels detectable above background. Within the promoter sequence will be found a transcription initiation site, as well as protein binding domains responsible for the binding of RNA polymerase. Eukaryotic promoters will often, but not always, contain “TATA” boxes and “CAT” boxes. Various promoters, including inducible promoters, may be used to drive the various vectors of the present invention.

[0068] A promoter can be a constitutively active promoter (i.e., a promoter that is constitutively in an active/“ON” state), it may be an inducible promoter (i.e., a promoter whose state, active/“ON” or inactive/“OFF”, is controlled by an external stimulus, e.g., the presence of a particular temperature, compound, or protein), it may be a spatially restricted promoter (i.e., transcriptional control element, enhancer, etc.)(e.g., tissue specific promoter, cell type specific promoter, etc.), and it may be a temporally restricted promoter (i.e., the promoter is in the “ON” state or “OFF” state during specific stages of embryonic development or during specific stages of a biological process, e.g., hair follicle cycle in mice).

[0069] Suitable promoters can be derived from viruses and can therefore be referred to as viral promoters, or they can be derived from any organism, including prokaryotic or eukaryotic organisms. Suitable promoters can be used to drive expression by any RNA polymerase (e.g., pol I, pol II, pol III). Exemplary promoters include, but are not limited to the SV40 early promoter, mouse mammary tumor virus long terminal repeat (LTR) promoter; adenovirus major late promoter (Ad MLP); a herpes simplex virus (HSV) promoter, a cytomegalovirus (CMV) promoter such as the CMV immediate early promoter region (CMVIE), a rous sarcoma virus (RSV) promoter, a human U6 small nuclear promoter (U6) (Miyagishi et al., Nature Biotechnology 20, 497-500 (2002)), an enhanced U6 promoter (e.g., Xia et al., Nucleic Acids Res. 2003 Sep. 1; 31(17)), a human H1 promoter (H1), and the like.

[0070] Examples of inducible promoters include, but are not limited to T7 RNA polymerase promoter, T3 RNA polymerase promoter, Isopropyl-beta-D-thiogalactopyranoside (IPTG)-regulated promoter, lactose induced promoter, heat shock promoter, Tetracycline-regulated promoter, Steroid-regulated promoter, Metal-regulated promoter, estrogen receptor-regulated promoter, etc. Inducible promoters can therefore be regulated by molecules including, but not limited to, doxycycline; RNA polymerase, e.g., T7 RNA polymerase; an estrogen receptor; an estrogen receptor fusion; etc.

[0071] In some embodiments, the promoter is a spatially restricted promoter (i.e., cell type specific promoter, tissue specific promoter, etc.) such that in a multi-cellular organism, the promoter is active (i.e., “ON”) in a subset of specific cells. Spatially restricted promoters may also be referred to as enhancers, transcriptional control elements, control sequences, etc. Any convenient spatially restricted promoter may be used and the choice of suitable promoter (e.g., a brain specific promoter, a promoter that drives expression in a subset of neurons, a promoter that drives expression in the germline, a promoter that drives expression in the lungs, a promoter that drives expression in muscles, a promoter that drives expression in islet cells of the pancreas, etc.) will depend on the organism. For example, various spatially restricted promoters are known for plants, flies, worms, mammals, mice, etc. Thus, a spatially restricted promoter can be used to regulate the expression of a nucleic acid encoding a site-directed modifying polypeptide in a wide variety of different tissues and cell types, depending on the organism. Some spatially restricted promoters are also temporally restricted such that the promoter is in the “ON” state or “OFF” state during specific stages of embryonic development or during specific stages of a biological process (e.g., hair follicle cycle in mice).

[0072] For illustration purposes, examples of spatially restricted promoters include, but are not limited to, neuron-specific promoters, adipocyte-specific promoters, cardiomyocyte-specific promoters, smooth muscle-specific promoters, photoreceptor-specific promoters, etc. Neuron-specific spatially restricted promoters include, but are not limited to, a neuron-specific enolase (NSE) promoter (see, e.g., EMBL HSENO2, X51956); an aromatic amino acid decarboxylase (AADC) promoter; a neurofilament promoter (see, e.g., GenBank HUMNFL, L04147); a synapsin promoter (see, e.g., GenBank HUMSYNIB, M55301); a thy-1 promoter (see, e.g., Chen et al. (1987) Cell 51:7-19; and Llewellyn, et al. (2010) Nat. Med. 16(10):1161-1166); a serotonin receptor promoter (see, e.g., GenBank S62283); a tyrosine hydroxylase promoter (TH) (see, e.g., Oh et al. (2009) Gene Ther 16:437; Sasaoka et al. (1992) Mol. Brain Res. 16:274; Boundy et al. (1998) J. Neurosci. 18:9989; and Kaneda et al. (1991) Neuron 6:583-594); a GnRH promoter (see, e.g., Radovick et al. (1991) Proc. Natl. Acad. Sci. USA 88:3402-3406); an L7 promoter (see, e.g., Oberdick et al. (1990) Science 248:223-226); a DNMT promoter (see, e.g., Bartge et al. (1988) Proc. Natl. Acad. Sci. USA 85:3648-3652); an enkephalin promoter (see, e.g., Comb et al. (1988) EMBO J. 17:3793-3805); a myelin basic protein (MBP) promoter; a Ca2+-calmodulin-dependent protein kinase II-alpha (CamKIM) promoter (see, e.g., Mayford et al. (1996) Proc. Natl. Acad. Sci. USA 93:13250; and Casanova et al. (2001) Genesis 31:37); a CMV enhancer/platelet-derived growth factor-p promoter (see, e.g., Liu et al. (2004) Gene Therapy 11:52-60); and the like.

[0073] Adipocyte-specific spatially restricted promoters include, but are not limited to aP2 gene promoter/enhancer, e.g., a region from −5.4 kb to +21 bp of a human aP2 gene (see, e.g., Tozzo et al. (1997) Endocrinol. 138:1604; Ross et al. (1990) Proc. Natl. Acad. Sci. USA 87:9590; and Pavjani et al. (2005) Nat. Med. 11:797); a glucose transporter-4 (GLUT4) promoter (see, e.g., Knight et al. (2003) Proc. Natl. Acad. Sci. USA 100:14725); a fatty acid translocase (FAT/CD36) promoter (see, e.g., Kuriki et al. (2002) Biol. Pharm. Bull. 25:1476; and Sato et al. (2002) J. Biol. Chem. 277:15703); a stearoyl-CoA desaturase-1 (SCD1) promoter (Tabor et al. (1999) J. Biol. Chem. 274:20603); a leptin promoter (see, e.g., Mason et al. (1998) Endocrinol. 139:1013; and Chen et al. (1999) Biochem. Biophys. Res. Comm. 262:187); an adiponectin promoter (see, e.g., Kita et al. (2005) Biochem. Biophys. Res. Comm. 331:484; and Chakrabarti (2010) Endocrinol. 151:2408); an adipsin promoter (see, e.g., Platt et al. (1989) Proc. Natl. Acad. Sci. USA 86:7490); a resistin promoter (see, e.g., Seo et al. (2003) Molec. Endocrinol. 17:1522); and the like.

[0074] Cardiomyocyte-specific spatially restricted promoters include, but are not limited to control sequences derived from the following genes: myosin light chain-2, a-myosin heavy chain, AE3, cardiac troponin C, cardiac actin, and the like. Franz et al. (1997) Cardiovasc. Res. 35:560-566; Robbins et al. (1995) Ann. N.Y. Acad. Sci. 752:492-505; Linn et al. (1995) Circ. Res. 76:584591; Parmacek et al. (1994) Mol. Cell. Biol. 14:1870-1885; Hunter et al. (1993) Hypertension 22:608-617; and Sartorelli et al. (1992) Proc. Natl. Acad. Sci. USA 89:4047-4051.

[0075] Smooth muscle-specific spatially restricted promoters include, but are not limited to an SM22a promoter (see, e.g., Akyiirek et al. (2000) Mol. Med. 6:983; and U.S. Pat. No. 7,169,874); a smoothelin promoter (see, e.g., WO 2001/018048); an a-smooth muscle actin promoter; and the like. For example, a 0.4 kb region of the SM22a promoter, within which lie two CArG elements, has been shown to mediate vascular smooth muscle cell-specific expression (see, e.g., Kim, et al. (1997) Mol. Cell. Biol. 17, 2266-2278; Li, et al., (1996) J. Cell Biol. 132, 849-859; and Moessler, et al. (1996) Development 122, 2415-2425).

[0076] Photoreceptor-specific spatially restricted promoters include, but are not limited to, a rhodopsin promoter; a rhodopsin kinase promoter (Young et al. (2003) Ophthalmol. Vis. Sci. 44:4076); a beta phosphodiesterase gene promoter (Nicoud et al. (2007) J. Gene Med. 9:1015); a retinitis pigmentosa gene promoter (Nicoud et al. (2007) supra); an interphotoreceptor retinoid-binding protein (IRBP) gene enhancer (Nicoud et al. (2007) supra); an IRBP gene promoter (Yokoyama et al. (1992) Exp Eye Res. 55:225); and the like.

[0077] The terms “DNA regulatory sequences,” “control elements,” and “regulatory elements,” used interchangeably herein, refer to transcriptional and translational control sequences, such as promoters, enhancers, polyadenylation signals, terminators, protein degradation signals, and the like, that provide for and/or regulate transcription of a non-coding sequence (e.g., guide RNA) or a coding sequence (e.g., site-directed modifying polypeptide, or Cas9 polypeptide) and/or regulate translation of an encoded polypeptide.

[0078] The term “naturally-occurring” or “unmodified” as used herein as applied to a nucleic acid, a polypeptide, a cell, or an organism, refers to a nucleic acid, polypeptide, cell, or organism that is found in nature. For example, a polypeptide or polynucleotide sequence that is present in an organism (including viruses) that can be isolated from a source in nature and which has not been intentionally modified by a human in the laboratory is naturally occurring.

[0079] The term “chimeric” as used herein as applied to a nucleic acid or polypeptide refers to two components that are defined by structures derived from different sources. For example, where “chimeric” is used in the context of a chimeric polypeptide (e.g., a chimeric Cas9 protein), the chimeric polypeptide includes amino acid sequences that are derived from different polypeptides. A chimeric polypeptide may comprise either modified or naturally-occurring polypeptide sequences (e.g., a first amino acid sequence from a modified or unmodified Cas9 protein; and a second amino acid sequence other than the Cas9 protein). Similarly, “chimeric” in the context of a polynucleotide encoding a chimeric polypeptide includes nucleotide sequences derived from different coding regions (e.g., a first nucleotide sequence encoding a modified or unmodified Cas9 protein; and a second nucleotide sequence encoding a polypeptide other than a Cas9 protein).

[0080] The term “chimeric polypeptide” refers to a polypeptide which is not naturally occurring, e.g., is made by the artificial combination (i.e., “fusion”) of two otherwise separated segments of amino sequence through human intervention. A polypeptide that comprises a chimeric amino acid sequence is a chimeric polypeptide. Some chimeric polypeptides can be referred to as “fusion variants.”

[0081] “Heterologous,” as used herein, means a nucleotide or peptide that is not found in the native nucleic acid or protein, respectively. For example, in a chimeric Cas9 protein, the RNA-binding domain of a naturally-occurring bacterial Cas9 polypeptide (or a variant thereof) may be fused to a heterologous polypeptide sequence (i.e. a polypeptide sequence from a protein other than Cas9 or a polypeptide sequence from another organism). The heterologous polypeptide may exhibit an activity (e.g., enzymatic activity) that will also be exhibited by the chimeric Cas9 protein (e.g., methyltransferase activity, acetyltransferase activity, kinase activity, ubiquitinating activity, etc.). A heterologous nucleic acid may be linked to a naturally-occurring nucleic acid (or a variant thereof) (e.g., by genetic engineering) to generate a chimeric polynucleotide encoding a chimeric polypeptide. As another example, in a fusion variant Cas9 site-directed polypeptide, a variant Cas9 site-directed polypeptide may be fused to a heterologous polypeptide (i.e. a polypeptide other than Cas9), which exhibits an activity that will also be exhibited by the fusion variant Cas9 site-directed polypeptide. A heterologous nucleic acid may be linked to a variant Cas9 site-directed polypeptide (e.g., by genetic engineering) to generate a polynucleotide encoding a fusion variant Cas9 site-directed polypeptide. “Heterologous,” as used herein, additionally means a nucleotide or polypeptide in a cell that is not its native cell.

[0082] The term “cognate” refers to two biomolecules that normally interact or co-exist in nature.

[0083] “Recombinant,” as used herein, means that a particular nucleic acid (DNA or RNA) or vector is the product of various combinations of cloning, restriction, polymerase chain reaction (PCR) and/or ligation steps resulting in a construct having a structural coding or non-coding sequence distinguishable from endogenous nucleic acids found in natural systems. DNA sequences encoding polypeptides can be assembled from cDNA fragments or from a series of synthetic oligonucleotides, to provide a synthetic nucleic acid which is capable of being expressed from a recombinant transcriptional unit contained in a cell or in a cell-free transcription and translation system. Genomic DNA comprising the relevant sequences can also be used in the formation of a recombinant gene or transcriptional unit. Sequences of non-translated DNA may be present 5′ or 3′ from the open reading frame, where such sequences do not interfere with manipulation or expression of the coding regions, and may indeed act to modulate production of a desired product by various mechanisms (see “DNA regulatory sequences”, below). Alternatively, DNA sequences encoding RNA (e.g., guide RNA) that is not translated may also be considered recombinant. Thus, e.g., the term “recombinant” nucleic acid refers to one which is not naturally occurring, e.g., is made by the artificial combination of two otherwise separated segments of sequence through human intervention. This artificial combination is often accomplished by either chemical synthesis means, or by the artificial manipulation of isolated segments of nucleic acids, e.g., by genetic engineering techniques. Such is usually done to replace a codon with a codon encoding the same amino acid, a conservative amino acid, or a non-conservative amino acid. Alternatively, it is performed to join together nucleic acid segments of desired functions to generate a desired combination of functions. This artificial combination is often accomplished by either chemical synthesis means, or by the artificial manipulation of isolated segments of nucleic acids, e.g., by genetic engineering techniques. When a recombinant polynucleotide encodes a polypeptide, the sequence of the encoded polypeptide can be naturally occurring (“wild type”) or can be a variant (e.g., a mutant) of the naturally occurring sequence. Thus, the term “recombinant” polypeptide does not necessarily refer to a polypeptide whose sequence does not naturally occur. Instead, a “recombinant” polypeptide is encoded by a recombinant DNA sequence, but the sequence of the polypeptide can be naturally occurring (“wild type”) or non-naturally occurring (e.g., a variant, a mutant, etc.). Thus, a “recombinant” polypeptide is the result of human intervention, but may be a naturally occurring amino acid sequence.

[0084] A “vector” or “expression vector” is a replicon, such as plasmid, phage, virus, or cosmid, to which another DNA segment, i.e. an “insert”, may be attached so as to bring about the replication of the attached segment in a cell.

[0085] An “expression cassette” comprises a DNA coding sequence operably linked to a promoter. “Operably linked” refers to a juxtaposition wherein the components so described are in a relationship permitting them to function in their intended manner. For instance, a promoter is operably linked to a coding sequence if the promoter affects its transcription or expression. The terms “recombinant expression vector,” or “DNA construct” are used interchangeably herein to refer to a DNA molecule comprising a vector and at least one insert. Recombinant expression vectors are usually generated for the purpose of expressing and/or propagating the insert(s), or for the construction of other recombinant nucleotide sequences. The nucleic acid(s) may or may not be operably linked to a promoter sequence and may or may not be operably linked to DNA regulatory sequences.

[0086] A cell has been “genetically modified” or “transformed” or “transfected” by exogenous DNA, e.g. a recombinant expression vector, when such DNA has been introduced inside the cell. The presence of the exogenous DNA results in permanent or transient genetic change. The transforming DNA may or may not be integrated (covalently linked) into the genome of the cell.

[0087] In prokaryotes, yeast, and mammalian cells for example, the transforming DNA may be maintained on an episomal element such as a plasmid. With respect to eukaryotic cells, a stably transformed cell is one in which the transforming DNA has become integrated into a chromosome so that it is inherited by daughter cells through chromosome replication. This stability is demonstrated by the ability of the eukaryotic cell to establish cell lines or clones that comprise a population of daughter cells containing the transforming DNA. A “clone” is a population of cells derived from a single cell or common ancestor by mitosis. A “cell line” is a clone of a primary cell that is capable of stable growth in vitro for many generations.

[0088] Suitable methods of genetic modification (also referred to as “transformation”) include e.g., viral or bacteriophage infection, transfection, conjugation, protoplast fusion, lipofection, electroporation, calcium phosphate precipitation, polyethyleneimine (PEI)-mediated transfection, DEAE-dextran mediated transfection, liposome-mediated transfection, particle gun technology, calcium phosphate precipitation, direct micro injection, nanoparticle-mediated nucleic acid delivery (see, e.g., Panyam et., al Adv Drug Deliv Rev. 2012 Sep. 13. pii: 50169-409X(12)00283-9. doi: 10.1016/j.addr.2012.09.023), and the like.

[0089] The choice of method of genetic modification is generally dependent on the type of cell being transformed and the circumstances under which the transformation is taking place (e.g., in vitro, ex vivo, or in vivo). A general discussion of these methods can be found in Ausubel, et al., Short Protocols in Molecular Biology, 3rd ed., Wiley & Sons, 1995.

[0090] A “host cell,” as used herein, denotes an in vivo or in vitro eukaryotic cell, a prokaryotic cell (e.g., bacterial or archaeal cell), or a cell from a multicellular organism (e.g., a cell line) cultured as a unicellular entity, which eukaryotic or prokaryotic cells can be, or have been, used as recipients for a nucleic acid, and include the progeny of the original cell which has been transformed by the nucleic acid. It is understood that the progeny of a single cell may not necessarily be completely identical in morphology or in genomic or total DNA complement as the original parent, due to natural, accidental, or deliberate mutation. A “recombinant host cell” (also referred to as a “genetically modified host cell”) is a host cell into which has been introduced a heterologous nucleic acid, e.g., an expression vector. For example, a bacterial host cell is a genetically modified bacterial host cell by virtue of introduction into a suitable bacterial host cell of an exogenous nucleic acid (e.g., a plasmid or recombinant expression vector) and a eukaryotic host cell is a genetically modified eukaryotic host cell (e.g., a mammalian germ cell), by virtue of introduction into a suitable eukaryotic host cell of an exogenous nucleic acid.

[0091] A “target DNA” as used herein is a DNA polynucleotide that comprises a “target site” or “target sequence.” The terms “target site,” “target sequence,” “target protospacer DNA,” or “protospacer-like sequence” are used interchangeably herein to refer to a nucleic acid sequence present in a target DNA to which a DNA-targeting segment of a guide RNA will bind, provided sufficient conditions for binding exist. For example, the target site (or target sequence) 5′-GAGCATATC-3′ within a target DNA is targeted by (or is bound by, or hybridizes with, or is complementary to) the RNA sequence 5′-GAUAUGCUC-3′. Suitable DNA/RNA binding conditions include physiological conditions normally present in a cell. Other suitable DNA/RNA binding conditions (e.g., conditions in a cell-free system) are known in the art; see, e.g., Sambrook, supra. The strand of the target DNA that is complementary to and hybridizes with the guide RNA is referred to as the “complementary strand” and the strand of the target DNA that is complementary to the “complementary strand” (and is therefore not complementary to the guide RNA) is referred to as the “noncomplementary strand” or “non-complementary strand.” By “site-directed modifying polypeptide” or “RNA-binding site-directed polypeptide” or “RNA-binding site-directed modifying polypeptide” or “site-directed polypeptide” it is meant a polypeptide that binds RNA and is targeted to a specific DNA sequence. A site-directed modifying polypeptide as described herein is targeted to a specific DNA sequence by the RNA molecule to which it is bound. The RNA molecule comprises a sequence that binds, hybridizes to, or is complementary to a target sequence within the target DNA, thus targeting the bound polypeptide to a specific location within the target DNA (the target sequence). Exemplary target sequences of the invention are set out in SEQ ID NOs: 801-2701. SEQ ID NOs: 801-973 are protospacer-like target sequences 5′ to the PAM sequence NNNNACA in the human CCR5 gene. SEQ ID NOs: 974-1078 are protospacer-like sequences 5′ to the PAM sequence GNNNCNNA in the human CCR5 gene. SEQ ID NOs: 1079-1222 are protospacer-like target sequences 5′ to the PAM sequence NNNNACA in the exons of the human CCR5 gene. SEQ ID NOs: 1223-1312 are protospacer-like sequences 5′ to the PAM sequence GNNNCNNA in the exons of the human CCR5 gene. SEQ ID NOs: 1313-1348 are protospacer-like target sequences 5′ to the PAM sequence NNNNACA around the 5′ end of the human CCR5 gene. SEQ ID NOs: 1349-1371 are protospacer-like sequences 5′ to the PAM sequence GNNNCNNA around the 5′ end of the human CCR5 gene. SEQ ID NOs: 1372-1415 are protospacer-like target sequences 5′ to the PAM sequence NNNNACA around the delta 32 locus in the human CCR5 gene. SEQ ID NOs: 1416-1443 are protospacer-like sequences 5′ to the PAM sequence GNNNCNNA around the delta 32 locus in the human CCR5 gene. SEQ ID NOs: 1444-1900 are protospacer-like target sequences 5′ to the PAM sequence NNNNACA in the human BCL11A gene. SEQ ID NOs: 1901-2162 are protospacer-like sequences 5′ to the PAM sequence GNNNCNNA in the human BCL11A gene. SEQ ID NOs: 2163-2482 are protospacer-like target sequences 5′ to the PAM sequence NNNNACA in the exons of the human BCL11A gene. SEQ ID NOs: 2483-2666 are protospacer-like sequences 5′ to the PAM sequence GNNNCNNA in the exons of the human BCL11A gene. SEQ ID NOs: 2667-2686 are protospacer-like target sequences 5′ to the PAM sequence NNNNACA around the 5′ end of the human BCL11A gene. SEQ ID NOs: 2687-2701 are protospacer-like sequences 5′ to the PAM sequence GNNNCNNA around the 5′ end of the human BCL11A gene. Target sequences at least 80% identical to the sequences set out in SEQ ID NOs: 801-2701 are also contemplated.

[0092] By “cleavage” it is meant the breakage of the covalent backbone of a DNA molecule. Cleavage can be initiated by a variety of methods including, but not limited to, enzymatic or chemical hydrolysis of a phosphodiester bond. Both single-stranded cleavage and double-stranded cleavage are possible, and double-stranded cleavage can occur as a result of two distinct single-stranded cleavage events. DNA cleavage can result in the production of either blunt ends or staggered ends. In certain embodiments, a complex comprising a guide RNA and a site-directed modifying polypeptide is used for targeted double-stranded DNA cleavage.

[0093] “Nuclease” and “endonuclease” are used interchangeably herein to mean an enzyme which possesses endonucleolytic catalytic activity for DNA cleavage.

[0094] By “cleavage domain” or “active domain” or “nuclease domain” of a nuclease it is meant the polypeptide sequence or domain within the nuclease which possesses the catalytic activity for DNA cleavage. A cleavage domain can be contained in a single polypeptide chain or cleavage activity can result from the association of two (or more) polypeptides. A single nuclease domain may consist of more than one isolated stretch of amino acids within a given polypeptide.

[0095] By “site-directed polypeptide” or “RNA-binding site-directed polypeptide” or “RNA-binding site-directed polypeptide” it is meant a polypeptide that binds RNA and is targeted to a specific DNA sequence. A site-directed polypeptide as described herein is targeted to a specific DNA sequence by the RNA molecule to which it is bound. The RNA molecule comprises a sequence that is complementary to a target sequence within the target DNA, thus targeting the bound polypeptide to a specific location within the target DNA (the target sequence).

[0096] The RNA molecule that binds to the site-directed modifying polypeptide and targets the polypeptide to a specific location within the target DNA is referred to herein as the “guide RNA” or “guide RNA polynucleotide” (also referred to herein as a “guide RNA” or “gRNA”). A guide RNA comprises two segments, a “DNA-targeting segment” and a “protein-binding segment.” By “segment” it is meant a segment/section/region of a molecule, e.g., a contiguous stretch of nucleotides in an RNA. A segment can also mean a region/section of a complex such that a segment may comprise regions of more than one molecule. For example, in some cases the protein-binding segment (described below) of a guide RNA is one RNA molecule and the protein-binding segment therefore comprises a region of that RNA molecule. In other cases, the protein-binding segment (described below) of a guide RNA comprises two separate molecules that are hybridized along a region of complementarity. As an illustrative, non-limiting example, a protein-binding segment of a guide RNA that comprises two separate molecules can comprise (i) base pairs 40-75 of a first RNA molecule that is 100 base pairs in length; and (ii) base pairs 10-25 of a second RNA molecule that is 50 base pairs in length. The definition of “segment,” unless otherwise specifically defined in a particular context, is not limited to a specific number of total base pairs, is not limited to any particular number of base pairs from a given RNA molecule, is not limited to a particular number of separate molecules within a complex, and may include regions of RNA molecules that are of any total length and may or may not include regions with complementarity to other molecules.

[0097] The DNA-targeting segment (or “DNA-targeting sequence”) comprises a nucleotide sequence that is complementary to a specific sequence within a target DNA (the complementary strand of the target DNA) designated the “protospacer-like” sequence herein. The protein-binding segment (or “protein-binding sequence”) interacts with a site-directed modifying polypeptide. When the site-directed modifying polypeptide is a Cas9 or Cas9 related polypeptide (described in more detail below), site-specific cleavage of the target DNA occurs at locations determined by both (i) base-pairing complementarity between the guide RNA and the target DNA; and (ii) a short motif (referred to as the protospacer adjacent motif (PAM)) in the target DNA.

[0098] The protein-binding segment of a guide RNA comprises, in part, two complementary stretches of nucleotides that hybridize to one another to form a double stranded RNA duplex (dsRNA duplex).

[0099] In some embodiments, a nucleic acid (e.g., a guide RNA, a nucleic acid comprising a nucleotide sequence encoding a guide RNA; a nucleic acid encoding a site-directed polypeptide; etc.) comprises a modification or sequence that provides for an additional desirable feature (e.g., modified or regulated stability; subcellular targeting; tracking, e.g., a fluorescent label; a binding site for a protein or protein complex; etc.). Non-limiting examples include: a 5′ cap (e.g., a 7-methylguanylate cap (m7G)); a 3′ polyadenylated tail (i.e., a 3′ poly(A) tail); a riboswitch sequence (e.g., to allow for regulated stability and/or regulated accessibility by proteins and/or protein complexes); a stability control sequence; a sequence that forms a dsRNA duplex (i.e., a hairpin)); a modification or sequence that targets the RNA to a subcellular location (e.g., nucleus, mitochondria, chloroplasts, and the like); a modification or sequence that provides for tracking (e.g., direct conjugation to a fluorescent molecule, conjugation to a moiety that facilitates fluorescent detection, a sequence that allows for fluorescent detection, etc.); a modification or sequence that provides a binding site for proteins (e.g., proteins that act on DNA, including transcriptional activators, transcriptional repressors, DNA methyltransferases, DNA demethylases, histone acetyltransferases, histone deacetylases, and the like); and combinations thereof.

[0100] In some embodiments, a guide RNA comprises an additional segment at either the 5′ or 3′ end that provides for any of the features described above. For example, a suitable third segment can comprise a 5′ cap (e.g., a 7-methylguanylate cap (m7G)); a 3′ polyadenylated tail (i.e., a 3′ poly(A) tail); a riboswitch sequence (e.g., to allow for regulated stability and/or regulated accessibility by proteins and protein complexes); a stability control sequence; a sequence that forms a dsRNA duplex (i.e., a hairpin)); a sequence that targets the RNA to a subcellular location (e.g., nucleus, mitochondria, chloroplasts, and the like); a modification or sequence that provides for tracking (e.g., direct conjugation to a fluorescent molecule, conjugation to a moiety that facilitates fluorescent detection, a sequence that allows for fluorescent detection, etc.); a modification or sequence that provides a binding site for proteins (e.g., proteins that act on DNA, including transcriptional activators, transcriptional repressors, DNA methyltransferases, DNA demethylases, histone acetyltransferases, histone deacetylases, and the like); and combinations thereof.

[0101] A guide RNA and a site-directed modifying polypeptide (i.e., site-directed polypeptide) form a complex (i.e., bind via non-covalent interactions). The guide RNA provides target specificity to the complex by comprising a nucleotide sequence that is complementary to a sequence of a target DNA. The site-directed modifying polypeptide of the complex provides the site-specific activity. In other words, the site-directed modifying polypeptide is guided to a target DNA sequence (e.g. a target sequence in a chromosomal nucleic acid; a target sequence in an extrachromosomal nucleic acid, e.g. an episomal nucleic acid, a minicircle, etc.; a target sequence in a mitochondrial nucleic acid; a target sequence in a chloroplast nucleic acid; a target sequence in a plasmid; etc.) by virtue of its association with the protein-binding segment of the guide RNA.

[0102] In some embodiments, a guide RNA comprises two separate RNA molecules (RNA polynucleotides: an “activator-RNA” and a “targeter-RNA”, see below) and is referred to herein as a “double-molecule guide RNA” or a “two-molecule guide RNA.” In other embodiments, the guide RNA is a single RNA molecule (single RNA polynucleotide) and is referred to herein as a “single-molecule guide RNA,” a “single-guide RNA,” or an “sgRNA.” The term “guide RNA” or “gRNA” is inclusive, referring both to double-molecule guide RNAs and to single-molecule guide RNAs (i.e., sgRNAs).

[0103] A two-molecule guide RNA comprises two separate RNA molecules (a “targeter-RNA” and an “activator-RNA”). Each of the two RNA molecules of a two-molecule guide RNA comprises a stretch of nucleotides that are complementary to one another such that the complementary nucleotides of the two RNA molecules hybridize to form the double stranded RNA duplex of the protein-binding segment.

[0104] An exemplary two-molecule guide RNA comprises a crRNA-like (“CRISPR RNA” or “targeter-RNA”) molecule (which includes a CRISPR repeat or CRISPR repeat-like sequence) and a corresponding tracrRNA-like (“trans-activating CRISPR RNA” or “activator-RNA” or “tracrRNA”) molecule. A crRNA-like molecule (targeter-RNA) comprises both the DNA-targeting segment (single stranded) of the guide RNA and a stretch (“duplex-forming segment”) of nucleotides that forms one half of the dsRNA duplex of the protein-binding segment of the guide RNA. A corresponding tracrRNA-like molecule (activator-RNA) comprises a stretch of nucleotides (duplex-forming segment) that forms the other half of the dsRNA duplex of the protein-binding segment of the guide RNA. In other words, a stretch of nucleotides of a crRNA-like molecule are complementary to and hybridize with a stretch of nucleotides of a tracrRNA-like molecule to form the dsRNA duplex of the protein-binding domain of the guide RNA. As such, each crRNA-like molecule can be said to have a corresponding tracrRNA-like molecule. The crRNA-like molecule additionally provides the single stranded DNA-targeting segment. Thus, a crRNA-like and a tracrRNA-like molecule (as a corresponding pair) hybridize to form a guide RNA. A double-molecule guide RNA can comprise any corresponding crRNA and tracrRNA pair.

[0105] A two-molecule guide RNA can be designed to allow for controlled (i.e., conditional) binding of a targeter-RNA with an activator-RNA. Because a two-molecule guide RNA is not functional unless both the activator-RNA and the targeter-RNA are bound in a functional complex with Cas9, a two-molecule guide RNA can be inducible (e.g., drug inducible) by rendering the binding between the activator-RNA and the targeter-RNA to be inducible. As one non-limiting example, RNA aptamers can be used to regulate (i.e., control) the binding of the activator-RNA with the targeter-RNA. Accordingly, the activator-RNA and/or the targeter-RNA can comprise an RNA aptamer sequence.

[0106] A single-molecule guide RNA comprises two stretches of nucleotides (a targeter-RNA and an activator-RNA) that are complementary to one another, are covalently linked (directly, or by intervening nucleotides), and hybridize to form the double stranded RNA duplex (dsRNA duplex) of the protein-binding segment, thus resulting in a stem-loop structure. The targeter-RNA and the activator-RNA can be covalently linked via the 3′ end of the targeter-RNA and the 5′ end of the activator-RNA. Alternatively, targeter-RNA and the activator-RNA can be covalently linked via the 5′ end of the targeter-RNA and the 3′ end of the activator-RNA.

[0107] An exemplary single-molecule guide RNA comprises two complementary stretches of nucleotides that hybridize to form a dsRNA duplex. In some embodiments, one of the two complementary stretches of nucleotides of the single-molecule guide RNA (or the DNA encoding the stretch) is at least about 60% Identical to one of the activator-RNA (tracrRNA) sequences set forth in Supplementary Table S5 over a stretch of at least 8 contiguous nucleotides. For example, one of the two complementary stretches of nucleotides of the single-molecule guide RNA (or the DNA encoding the stretch) is at least about 65% identical, at least about 70% identical, at least about 75% identical, at least about 80% identical, at least about 85% identical, at least about 90% identical, at least about 95% identical, at least about 98% identical, at least about 99% identical or 100% identical to one of the tracrRNA sequences set forth in Supplementary Table S5 over a stretch of at least 8 contiguous, at least 9 contiguous, at least 10 contiguous, at least 11 contiguous, at least 12 contiguous, at least 13 contiguous, at least 14 contiguous or at least 15 contiguous nucleotides. For example, the single-molecule guide RNA may comprise a nucleotide sequence that is at least 70% identical over at least 10 contiguous nucleotides, at least 80% identical over at least 10 contiguous nucleotides, at least 70% identical over at least 11 contiguous nucleotides, at least 80% identical over at least 11 contiguous nucleotides, at least 70% identical over at least 12 contiguous nucleotides, or at least 80% identical over at least 12 contiguous nucleotides of one of the tracrRNA sequences set forth in Supplementary Table S5. It is understood that where a series of percent identities and a series of lengths of nucleotides sequences are set out as options, each and every combination of a percent identity with a length (e.g. 8, 9, 10, 12, 13, 14, 15 nucleotides) of nucleotide sequence is contemplated.

[0108] In some embodiments, one of the two complementary stretches of nucleotides of the single-molecule guide RNA (or the DNA encoding the stretch) is at least about 60% identical to one of the targeter-RNA (crRNA/CRISPR repeat) sequences set forth in Supplementary Table S5 over a stretch of at least 8 contiguous nucleotides. For example, one of the two complementary stretches of nucleotides of the single-molecule guide RNA (or the DNA encoding the stretch) is at least about 65% identical, at least about 70% identical, at least about 75% identical, at least about 80% identical, at least about 85% identical, at least about 90% identical, at least about 95% identical, at least about 98% identical, at least about 99% identical or 100% identical to one of the crRNA/CRISPR repeat sequences set forth in Supplementary Table S5 over a stretch of at least 8 contiguous, at least 9 contiguous, at least 10 contiguous, at least 11 contiguous, at least 12 contiguous, at least 13 contiguous, at least 14 contiguous or at least 15 contiguous nucleotides. For example, the single-molecule guide RNA may comprise a nucleotide sequence that is at least 70% identical over at least 10 contiguous nucleotides, at least 80% identical over at least 10 contiguous nucleotides, at least 70% identical over at least 11 contiguous nucleotides, at least 80% identical over at least 11 contiguous nucleotides, at least 70% identical over at least 12 contiguous nucleotides, or at least 80% identical over at least 12 contiguous nucleotides of one of the CRISPR repeat sequences set forth in Supplementary Table S5. It is understood that where a series of percent identities and a series of lengths of nucleotides sequences are set out as options, each and every combination of a percent identity with a length (e.g. 8, 9, 10, 11, 12, 13, 14, 15 nucleotides) of nucleotide sequence is contemplated.

[0109] The term “activator-RNA” is used herein to mean a tracrRNA-like molecule of a double-molecule guide RNA. The term “targeter-RNA” is used herein to mean a crRNA-like molecule of a double-molecule guide RNA. The term “duplex-forming segment” is used herein to mean the stretch of nucleotides of an activator-RNA or a targeter-RNA that contributes to the formation of the dsRNA duplex by hybridizing to a stretch of nucleotides of a corresponding activator-RNA or targeter-RNA molecule. In other words, an activator-RNA comprises a duplex-forming segment that is complementary to the duplex-forming segment of the corresponding targeter-RNA. As such, an activator-RNA comprises a duplex-forming segment while a targeter-RNA comprises both a duplex-forming segment and the DNA-targeting segment of the guide RNA. Therefore, a double-molecule guide RNA can be comprised of any corresponding activator-RNA and targeter-RNA pair.

[0110] RNA aptamers are known in the art and are generally a synthetic version of a riboswitch. The terms “RNA aptamer” and “riboswitch” are used interchangeably herein to encompass both synthetic and natural nucleic acid sequences that provide for inducible regulation of the structure (and therefore the availability of specific sequences) of the RNA molecule of which they are part. RNA aptamers usually comprise a sequence that folds into a particular structure (e.g., a hairpin), which specifically binds a particular drug (e.g., a small molecule). Binding of the drug causes a structural change in the folding of the RNA, which changes a feature of the nucleic acid of which the aptamer is a part. As non-limiting examples: (i) an activator-RNA with an aptamer may not be able to bind to the cognate targeter-RNA unless the aptamer is bound by the appropriate drug; (ii) a targeter-RNA with an aptamer may not be able to bind to the cognate activator-RNA unless the aptamer is bound by the appropriate drug; and (iii) a targeter-RNA and an activator-RNA, each comprising a different aptamer that binds a different drug, may not be able to bind to each other unless both drugs are present. As illustrated by these examples, a two-molecule guide RNA can be designed to be inducible.

[0111] Examples of aptamers and riboswitches can be found, for example, in: Nakamura et al., Genes Cells. 2012 May; 17(5):344-64; Vavalle et al., Future Cardiol. 2012 May; 8(3):371-82; Citartan et al., Biosens Bioelectron. 2012 April 15; 34(1):1-11; and Liberman et al., Wiley Interdiscip Rev RNA. 2012 May-June; 3(3):369-84; all of which are herein incorporated by reference in their entirety.

[0112] The term “stem cell” is used herein to refer to a cell (e.g., plant stem cell, vertebrate stem cell) that has the ability both to self-renew and to generate a differentiated cell type (see Morrison et al. (1997) Cell 88:287-298). In the context of cell ontogeny, the adjective “differentiated”, or “differentiating” is a relative term. A “differentiated cell” is a cell that has progressed further down the developmental pathway than the cell it is being compared with. Thus, pluripotent stem cells (described below) can differentiate into lineage-restricted progenitor cells (e.g., mesodermal stem cells), which in turn can differentiate into cells that are further restricted (e.g., neuron progenitors), which can differentiate into end-stage cells (i.e., terminally differentiated cells, e.g., neurons, cardiomyocytes, etc.), which play a characteristic role in a certain tissue type, and may or may not retain the capacity to proliferate further. Stem cells may be characterized by both the presence of specific markers (e.g., proteins, RNAs, etc.) and the absence of specific markers. Stem cells may also be identified by functional assays both in vitro and in vivo, particularly assays relating to the ability of stem cells to give rise to multiple differentiated progeny.

[0113] Stem cells of interest include pluripotent stem cells (PSCs). The term “pluripotent stem cell” or “PSC” is used herein to mean a stem cell capable of producing all cell types of the organism. Therefore, a PSC can give rise to cells of all germ layers of the organism (e.g., the endoderm, mesoderm, and ectoderm of a vertebrate). Pluripotent cells are capable of forming teratomas and of contributing to ectoderm, mesoderm, or endoderm tissues in a living organism. Pluripotent stem cells of plants are capable of giving rise to all cell types of the plant (e.g., cells of the root, stem, leaves, etc.).

[0114] PSCs of animals can be derived in a number of different ways. For example, embryonic stem cells (ESCs) are derived from the inner cell mass of an embryo (Thomson et. al, Science. 1998 November 6; 282(5391):1145-7) whereas induced pluripotent stem cells (iPSCs) are derived from somatic cells (Takahashi et. al, Cell. 2007 November 30; 131(5):861-72; Takahashi et. al, Nat Protoc. 2007; 2(12):3081-9; Yu et. al, Science. 2007 December 21; 318(5858):1917-20. Epub 2007 November 20). Because the term PSC refers to pluripotent stem cells regardless of their derivation, the term PSC encompasses the terms ESC and iPSC, as well as the term embryonic germ stem cells (EGSC), which are another example of a PSC. PSCs may be in the form of an established cell line, they may be obtained directly from primary embryonic tissue, or they may be derived from a somatic cell. PSCs can be target cells of the methods described herein.

[0115] By “embryonic stem cell” (ESC) is meant a PSC that was isolated from an embryo, typically from the inner cell mass of the blastocyst. ESC lines are listed in the NIH Human Embryonic Stem Cell Registry, e.g. hESBGN-01, hESBGN-02, hESBGN-03, hESBGN-04 (BresaGen, Inc.); HES-1, HES-2, HES-3, HES-4, HES-5, HES-6 (ES Cell International); Miz-hES1 (MizMedi Hospital-Seoul National University); HSF-1, HSF-6 (University of California at San Francisco); and H1, H7, H9, H13, H14 (Wisconsin Alumni Research Foundation (WiCell Research Institute)). Stem cells of interest also include embryonic stem cells from other primates, such as Rhesus stem cells and marmoset stem cells. The stem cells may be obtained from any mammalian species, e.g. human, equine, bovine, porcine, canine, feline, rodent, e.g. mice, rats, hamster, primate, etc. (Thomson et al. (1998) Science 282:1145; Thomson et al. (1995) Proc. Natl. Acad. Sci USA 92:7844; Thomson et al. (1996) Biol. Reprod. 55:254; Shamblott et al., Proc. Natl. Acad. Sci. USA 95:13726, 1998). In culture, ESCs typically grow as flat colonies with large nucleo-cytoplasmic ratios, defined borders and prominent nucleoli. In addition, ESCs express SSEA-3, SSEA-4, TRA-1-60, TRA-1-81, and Alkaline Phosphatase, but not SSEA-1. Examples of methods of generating and characterizing ESCs may be found in, for example, U.S. Pat. No. 7,029,913, U.S. Pat. No. 5,843,780, and U.S. Pat. No. 6,200,806, the disclosures of which are incorporated herein by reference. Methods for proliferating hESCs in the undifferentiated form are described in WO 99/20741, WO 01/51616, and WO 03/020920. By “embryonic germ stem cell” (EGSC) or “embryonic germ cell” or “EG cell” is meant a PSC that is derived from germ cells and/or germ cell progenitors, e.g. primordial germ cells, i.e. those that would become sperm and eggs. Embryonic germ cells (EG cells) are thought to have properties similar to embryonic stem cells as described above. Examples of methods of generating and characterizing EG cells may be found in, for example, U.S. Pat. No. 7,153,684; Matsui, Y., et al., (1992) Cell 70:841; Shamblott, M., et al. (2001) Proc. Natl. Acad. Sci. USA 98: 113; Shamblott, M., et al. (1998) Proc. Natl. Acad. Sci. USA, 95:13726; and Koshimizu, U., et al. (1996) Development, 122:1235, the disclosures of which are incorporated herein by reference.

[0116] By “induced pluripotent stem cell” or “iPSC” it is meant a PSC that is derived from a cell that is not a PSC (i.e., from a cell this is differentiated relative to a PSC). iPSCs can be derived from multiple different cell types, including terminally differentiated cells. iPSCs have an ES cell-like morphology, growing as flat colonies with large nucleo-cytoplasmic ratios, defined borders and prominent nuclei. In addition, iPSCs express one or more key pluripotency markers known by one of ordinary skill in the art, including but not limited to Alkaline Phosphatase, SSEA3, SSEA4, Sox2, Oct3/4, Nanog, TRA160, TRA181, TDGF 1, Dnmt3b, FoxD3, GDF3, Cyp26al, TERT, and zfp42. Examples of methods of generating and characterizing iPSCs may be found in, for example, U.S. Patent Publication Nos. US20090047263, US20090068742, US20090191159, US20090227032, US20090246875, and US20090304646, the disclosures of which are incorporated herein by reference. Generally, to generate iPSCs, somatic cells are provided with reprogramming factors (e.g. Oct4, SOX2, KLF4, MYC, Nanog, Lin28, etc.) known in the art to reprogram the somatic cells to become pluripotent stem cells.

[0117] By “somatic cell” it is meant any cell in an organism that, in the absence of experimental manipulation, does not ordinarily give rise to all types of cells in an organism. In other words, somatic cells are cells that have differentiated sufficiently that they will not naturally generate cells of all three germ layers of the body, i.e. ectoderm, mesoderm and endoderm. For example, somatic cells would include both neurons and neural progenitors, the latter of which may be able to naturally give rise to all or some cell types of the central nervous system but cannot give rise to cells of the mesoderm or endoderm lineages.

[0118] By “mitotic cell” it is meant a cell undergoing mitosis. Mitosis is the process by which a eukaryotic cell separates the chromosomes in its nucleus into two identical sets in two separate nuclei. It is generally followed immediately by cytokinesis, which divides the nuclei, cytoplasm, organelles and cell membrane into two cells containing roughly equal shares of these cellular components.

[0119] By “post-mitotic cell” it is meant a cell that has exited from mitosis, i.e., it is “quiescent”, i.e. it is no longer undergoing divisions. This quiescent state may be temporary, i.e. reversible, or it may be permanent.

[0120] By “meiotic cell” it is meant a cell that is undergoing meiosis. Meiosis is the process by which a cell divides its nuclear material for the purpose of producing gametes or spores. Unlike mitosis, in meiosis, the chromosomes undergo a recombination step which shuffles genetic material between chromosomes. Additionally, the outcome of meiosis is four (genetically unique) haploid cells, as compared with the two (genetically identical) diploid cells produced from mitosis.

[0121] By “recombination” it is meant a process of exchange of genetic information between two polynucleotides. As used herein, “homology-directed repair (HDR)” refers to the specialized form DNA repair that takes place, for example, during repair of double-strand breaks in cells. This process requires nucleotide sequence homology, uses a “donor” molecule to template repair of a “target” molecule (i.e., the one that experienced the double-strand break), and leads to the transfer of genetic information from the donor to the target. Homology-directed repair may result in an alteration of the sequence of the target molecule (e.g., insertion, deletion, mutation), if the donor polynucleotide differs from the target molecule and part or all of the sequence of the donor polynucleotide is incorporated into the target DNA. In some embodiments, the donor polynucleotide, a portion of the donor polynucleotide, a copy of the donor polynucleotide, or a portion of a copy of the donor polynucleotide integrates into the target DNA.

[0122] By “non-homologous end joining (NHEJ)” it is meant the repair of double-strand breaks in DNA by direct ligation of the break ends to one another without the need for a homologous template (in contrast to homology-directed repair, which requires a homologous sequence to guide repair). NHEJ often results in the loss (deletion) of nucleotide sequence near the site of the double-strand break.

[0123] The terms “treatment”, “treating” and the like are used herein to generally mean obtaining a desired pharmacologic and/or physiologic effect. The effect may be prophylactic in terms of completely or partially preventing a disease or symptom thereof and/or may be therapeutic in terms of a partial or complete cure for a disease and/or adverse effect attributable to the disease. “Treatment” as used herein covers any treatment of a disease or symptom in a mammal, and includes: (a) preventing the disease or symptom from occurring in a subject which may be predisposed to acquiring the disease or symptom but has not yet been diagnosed as having it; (b) inhibiting the disease or symptom, i.e., arresting its development; or (c) relieving the disease, i.e., causing regression of the disease. The therapeutic agent may be administered before, during or after the onset of disease or injury. The treatment of ongoing disease, where the treatment stabilizes or reduces the undesirable clinical symptoms of the patient, is of particular interest. Such treatment is desirably performed prior to complete loss of function in the affected tissues. The therapy will desirably be administered during the symptomatic stage of the disease, and in some cases after the symptomatic stage of the disease.

[0124] The terms “individual,” “subject,” “host,” and “patient,” are used interchangeably herein and refer to any mammalian subject for whom diagnosis, treatment, or therapy is desired, particularly humans.

[0125] General methods in molecular and cellular biochemistry can be found in such standard textbooks as Molecular Cloning: A Laboratory Manual, 3rd Ed. (Sambrook et al., HaRBor Laboratory Press 2001); Short Protocols in Molecular Biology, 4th Ed. (Ausubel et al. eds., John Wiley & Sons 1999); Protein Methods (Bollag et al., John Wiley & Sons 1996); Nonviral Vectors for Gene Therapy (Wagner et al. eds., Academic Press 1999); Viral Vectors (Kaplift & Loewy eds., Academic Press 1995); Immunology Methods Manual (I. Lefkovits ed., Academic Press 1997); and Cell and Tissue Culture: Laboratory Procedures in Biotechnology (Doyle & Griffiths, John Wiley & Sons 1998), the disclosures of which are incorporated herein by reference.

[0126] Where a range of values is provided, it is understood that each intervening value, to the tenth of the unit of the lower limit unless the context clearly dictates otherwise, between the upper and lower limit of that range and any other stated or intervening value in that stated range, is encompassed within the invention. The upper and lower limits of these smaller ranges may independently be included in the smaller ranges, and are also encompassed within the invention, subject to any specifically excluded limit in the stated range. Where the stated range includes one or both of the limits, ranges excluding either or both of those included limits are also included in the invention.

[0127] The phrase “consisting essentially of” is meant herein to exclude anything that is not the specified active component or components of a system, or that is not the specified active portion or portions of a molecule.

[0128] Certain ranges are presented herein with numerical values being preceded by the term “about.” The term “about” is used herein to provide literal support for the exact number that it precedes, as well as a number that is near to or approximately the number that the term precedes. In determining whether a number is near to or approximately a specifically recited number, the near or approximating unrecited number may be a number which, in the context in which it is presented, provides the substantial equivalent of the specifically recited number.

[0129] It is appreciated that certain features of the invention, which are, for clarity, described in the context of separate embodiments, may also be provided in combination in a single embodiment. Conversely, various features of the invention, which are, for brevity, described in the context of a single embodiment, may also be provided separately or in any suitable sub-combination. All combinations of the embodiments pertaining to the invention are specifically embraced by the present invention and are disclosed herein just as if each and every combination was individually and explicitly disclosed. In addition, all sub-combinations of the various embodiments and elements thereof are also specifically embraced by the present invention and are disclosed herein just as if each and every such sub-combination was individually and explicitly disclosed herein.

[0130] Aspects of the Disclosure—Part I

[0131] Nucleic Acids

[0132] Guide RNA

[0133] The present disclosure provides a guide RNA that directs the activities of an associated polypeptide (e.g., a site-directed modifying polypeptide) to a specific target sequence within a target DNA. A guide RNA comprises: a first segment (also referred to herein as a “DNA-targeting segment” or a “DNA-targeting sequence”) and a second segment (also referred to herein as a “protein-binding segment” or a “protein-binding sequence”).

[0134] DNA-Targeting Segment of a Guide RNA

[0135] The DNA-targeting segment of a guide RNA comprises a nucleotide sequence that is complementary to a sequence in a target DNA. In other words, the DNA-targeting segment of a guide RNA interacts with a target DNA in a sequence-specific manner via hybridization (i.e., base pairing). As such, the nucleotide sequence of the DNA-targeting segment may vary and determines the location within the target DNA that the guide RNA and the target DNA will interact. The DNA-targeting segment of a guide RNA can be modified (e.g., by genetic engineering) to hybridize to any desired sequence within a target DNA.

[0136] The DNA-targeting segment can have a length of from about 12 nucleotides to about 100 nucleotides. For example, the DNA-targeting segment can have a length of from about 12 nucleotides (nt) to about 80 nt, from about 12 nt to about 50 nt, from about 12 nt to about 40 nt, from about 12 nt to about 30 nt, from about 12 nt to about 25 nt, from about 12 nt to about 20 nt, or from about 12 nt to about 19 nt. For example, the DNA-targeting segment can have a length of from about 19 nt to about 20 nt, from about 19 nt to about 25 nt, from about 19 nt to about 30 nt, from about 19 nt to about 35 nt, from about 19 nt to about 40 nt, from about 19 nt to about 45 nt, from about 19 nt to about 50 nt, from about 19 nt to about 60 nt, from about 19 nt to about 70 nt, from about 19 nt to about 80 nt, from about 19 nt to about 90 nt, from about 19 nt to about 100 nt, from about 20 nt to about 25 nt, from about 20 nt to about 30 nt, from about 20 nt to about 35 nt, from about 20 nt to about 40 nt, from about 20 nt to about 45 nt, from about 20 nt to about 50 nt, from about 20 nt to about 60 nt, from about 20 nt to about 70 nt, from about 20 nt to about 80 nt, from about 20 nt to about 90 nt, or from about 20 nt to about 100 nt. The nucleotide sequence (the DNA-targeting sequence) of the DNA-targeting segment that is complementary to a nucleotide sequence (target sequence) of the target DNA can have a length at least about 12 nt. For example, the DNA-targeting sequence of the DNA-targeting segment that is complementary to a target sequence of the target DNA can have a length at least about 12 nt, at least about 15 nt, at least about 18 nt, at least about 19 nt, at least about 20 nt, at least about 25 nt, at least about 30 nt, at least about 35 nt or at least about 40 nt. For example, the DNA-targeting sequence of the DNA-targeting segment that is complementary to a target sequence of the target DNA can have a length of from about 12 nucleotides (nt) to about 80 nt, from about 12 nt to about 50 nt, from about 12 nt to about 45 nt, from about 12 nt to about 40 nt, from about 12 nt to about 35 nt, from about 12 nt to about 30 nt, from about 12 nt to about 25 nt, from about 12 nt to about 20 nt, from about 12 nt to about 19 nt, from about 19 nt to about 20 nt, from about 19 nt to about 25 nt, from about 19 nt to about 30 nt, from about 19 nt to about 35 nt, from about 19 nt to about 40 nt, from about 19 nt to about 45 nt, from about 19 nt to about 50 nt, from about 19 nt to about 60 nt, from about 20 nt to about 25 nt, from about 20 nt to about 30 nt, from about 20 nt to about 35 nt, from about 20 nt to about 40 nt, from about 20 nt to about 45 nt, from about 20 nt to about 50 nt, or from about 20 nt to about 60 nt. The nucleotide sequence (the DNA-targeting sequence) of the DNA-targeting segment that is complementary to a nucleotide sequence (target sequence) of the target DNA can have a length at least about 12 nt.

[0137] In some cases, the DNA-targeting sequence of the DNA-targeting segment that is complementary to a target sequence of the target DNA is 20 nucleotides in length. In some cases, the DNA-targeting sequence of the DNA-targeting segment that is complementary to a target sequence of the target DNA is 16 nucleotides, 17 nucleotides, 18 nucleotides or 19 nucleotides in length.

[0138] The percent complementarity between the DNA-targeting sequence of the DNA-targeting segment and the target sequence of the target DNA can be at least 60% (e.g., at least 65%, at least 70%, at least 75%, at least 80%, at least 85%, at least 90%, at least 95%, at least 97%, at least 98%, at least 99%, or 100%). For example, the DNA-targeting sequence may be at least about 80% identical to about 10 contiguous nucleotides, or at least about 80% identical to about 11 contiguous nucleotides, or at least about 80% identical to about 12 contiguous nucleotides, or at least about 80% identical to about 13 contiguous nucleotides, or at least about 80% identical to about 14 contiguous nucleotides, or at least about 80% identical to about 15 contiguous nucleotides, or at least about 80% identical to about 16 contiguous nucleotides, or at least about 80% identical to about 17 contiguous nucleotides of the target sequence. In some cases, the percent complementarity between the DNA-targeting sequence of the DNA-targeting segment and the target sequence of the target DNA is 100% over the seven contiguous 5′-most nucleotides of the target sequence of the complementary strand of the target DNA. In some cases, the percent complementarity between the DNA-targeting sequence of the DNA-targeting segment and the target sequence of the target DNA is at least 60% over about 20 contiguous nucleotides. In some cases, the percent complementarity between the DNA-targeting sequence of the DNA-targeting segment and the target sequence of the target DNA is 100% over the fourteen contiguous 5′-most nucleotides of the target sequence of the complementary strand of the target DNA and as low as 0% over the remainder. In such a case, the DNA-targeting sequence can be considered to be 14 nucleotides in length. In some cases, the percent complementarity between the DNA-targeting sequence of the DNA-targeting segment and the target sequence of the target DNA is 100% over the seven contiguous 5′-most nucleotides of the target sequence of the complementary strand of the target DNA and as low as 0% over the remainder. In such a case, the DNA-targeting sequence can be considered to be 7 nucleotides in length.

[0139] Protein-Binding Segment of a Guide RNA

[0140] The protein-binding segment of a guide RNA interacts with a site-directed modifying polypeptide. The guide RNA guides the bound polypeptide to a specific nucleotide sequence within target DNA via the above mentioned DNA-targeting segment. The protein-binding segment of a guide RNA comprises two stretches of nucleotides that are complementary to one another. The complementary nucleotides of the protein-binding segment hybridize to form a double stranded RNA duplex (dsRNA).

[0141] A double-molecule guide RNA comprises two separate RNA molecules. Each of the two RNA molecules of a double-molecule guide RNA comprises a stretch of nucleotides that are complementary to one another such that the complementary nucleotides of the two RNA molecules hybridize to form the double-stranded RNA duplex of the protein-binding segment.

[0142] In some embodiments, the duplex-forming segment of the activator-RNA is at least about 60% identical to one of the activator-RNA (tracrRNA) molecules set forth in Supplementary Table S5, or a complement thereof, over a stretch of at least 8 contiguous nucleotides. For example, the duplex-forming segment of the activator-RNA (or the DNA encoding the duplex-forming segment of the activator-RNA) is at least about 60% identical, at least about 65% identical, at least about 70% identical, at least about 75% identical, at least about 80% identical, at least about 85% identical, at least about 90% identical, at least about 95% identical, at least about 98% identical, at least about 99% identical, or 100% identical, to one of the tracrRNA sequences set forth in Supplementary Table S5, or a complement thereof, over a stretch of at least 8 contiguous, at least 9 contiguous, at least 10 contiguous, at least 11 contiguous, at least 12 contiguous, at least 13 contiguous, at least 14 contiguous or at least 15 contiguous nucleotides. For example, the activator-RNA may comprise a nucleotide sequence that is at least 70% identical over at least 10 contiguous nucleotides, at least 80% identical over at least 10 contiguous nucleotides, at least 70% identical over at least 11 contiguous nucleotides, at least 80% identical over at least 11 contiguous nucleotides, at least 70% identical over at least 12 contiguous nucleotides, or at least 80% identical over at least 12 contiguous nucleotides of one of the tracrRNA sequences set forth in Supplementary Table S5.

[0143] In some embodiments, the duplex-forming segment of the targeter-RNA is at least about 60% identical to one of the targeter-RNA (crRNA/CRISPR repeat) sequences set forth in Supplementary Table S5, or a complement thereof, over a stretch of at least 8 contiguous nucleotides. For example, the duplex-forming segment of the targeter-RNA (or the DNA encoding the duplex-forming segment of the targeter-RNA) is at least about 65% identical, at least about 70% identical, at least about 75% identical, at least about 80% identical, at least about 85% identical, at least about 90% identical, at least about 95% identical, at least about 98% identical, at least about 99% identical or 100% identical to one of the crRNA/CRISPR repeat sequences set forth in Supplementary Table S5, or a complement thereof, over a stretch of at least 8 contiguous, at least 9 contiguous, at least 10 contiguous, at least 11 contiguous, at least 12 contiguous, at least 13 contiguous, at least 14 contiguous or at least 15 contiguous nucleotides. For example, the targeter-RNA may comprise a nucleotide sequence that is at least 70% identical over at least 10 contiguous nucleotides, at least 80% identical over at least 10 contiguous nucleotides, at least 70% identical over at least 11 contiguous nucleotides, at least 80% identical over at least 11 contiguous nucleotides, at least 70% identical over at least 12 contiguous nucleotides, at least 80% identical over at least 12 contiguous nucleotides, at least 80% identical over at least 13 contiguous nucleotides, at least 80% identical over at least 14 contiguous nucleotides, at least 80% identical over at least 15 contiguous nucleotides, at least 80% identical over at least 16 contiguous nucleotides, or at least 80% identical over at least 17 contiguous nucleotides, to one of the CRISPR repeat sequences set forth in Supplementary Table S5.

[0144] A two-molecule guide RNA can be designed to allow for controlled (i.e., conditional) binding of a targeter-RNA with an activator-RNA. Because a two-molecule guide RNA is not functional unless both the activator-RNA and the targeter-RNA are bound in a functional complex with Cas9, a two-molecule guide RNA can be inducible (e.g., drug inducible) by rendering the binding between the activator-RNA and the targeter-RNA to be inducible. As one non-limiting example, RNA aptamers can be used to regulate (i.e., control) the binding of the activator-RNA with the targeter-RNA. Accordingly, the activator-RNA and/or the targeter-RNA can comprise an RNA aptamer sequence.

[0145] RNA aptamers are known in the art and are generally a synthetic version of a riboswitch. The terms “RNA aptamer” and “riboswitch” are used interchangeably herein to encompass both synthetic and natural nucleic acid sequences that provide for inducible regulation of the structure (and therefore the availability of specific sequences) of the RNA molecule of which they are part. RNA aptamers usually comprise a sequence that folds into a particular structure (e.g., a hairpin), which specifically binds a particular drug (e.g., a small molecule). Binding of the drug causes a structural change in the folding of the RNA, which changes a feature of the nucleic acid of which the aptamer is a part. As non-limiting examples: (i) an activator-RNA with an aptamer may not be able to bind to the cognate targeter-RNA unless the aptamer is bound by the appropriate drug; (ii) a targeter-RNA with an aptamer may not be able to bind to the cognate activator-RNA unless the aptamer is bound by the appropriate drug; and (iii) a targeter-RNA and an activator-RNA, each comprising a different aptamer that binds a different drug, may not be able to bind to each other unless both drugs are present. As illustrated by these examples, a two-molecule guide RNA can be designed to be inducible.

[0146] Examples of aptamers and riboswitches can be found, for example, in: Nakamura et al., Genes Cells. 2012 May; 17(5):344-64; Vavalle et al., Future Cardiol. 2012 May; 8(3):371-82; Citartan et al., Biosens Bioelectron. 2012 April 15; 34(1):1-11; and Liberman et al., Wiley Interdiscip Rev RNA. 2012 May-June; 3(3):369-84; all of which are herein incorporated by reference in their entirety.

[0147] Non-limiting examples of nucleotide sequences that can be included in a two-molecule guide RNA include either of the sequences set forth in Supplementary Table S5, or complements thereof pairing with any sequences set forth in Supplementary Table S5, or complements thereof that can hybridize to form a protein binding segment.

[0148] A single-molecule guide RNA comprises two stretches of nucleotides (a targeter-RNA and an activator-RNA) that are complementary to one another, are covalently linked (directly, or by intervening nucleotides referred to as “linkers” or “linker nucleotides”), and hybridize to form the double stranded RNA duplex (dsRNA duplex) of the protein-binding segment, thus resulting in a stem-loop structure. The targeter-RNA and the activator-RNA can be covalently linked via the 3′ end of the targeter-RNA and the 5′ end of the activator-RNA. Alternatively, targeter-RNA and the activator-RNA can be covalently linked via the 5′ end of the targeter-RNA and the 3′ end of the activator-RNA.

[0149] The linker of a single-molecule guide RNA can have a length of from about 3 nucleotides to about 100 nucleotides. For example, the linker can have a length of from about 3 nucleotides (nt) to about 90 nt, from about 3 nucleotides (nt) to about 80 nt, from about 3 nucleotides (nt) to about 70 nt, from about 3 nucleotides (nt) to about 60 nt, from about 3 nucleotides (nt) to about 50 nt, from about 3 nucleotides (nt) to about 40 nt, from about 3 nucleotides (nt) to about 30 nt, from about 3 nucleotides (nt) to about 20 nt or from about 3 nucleotides (nt) to about 10 nt. For example, the linker can have a length of from about 3 nt to about 5 nt, from about 5 nt to about 10 nt, from about 10 nt to about 15 nt, from about 15 nt to about 20 nt, from about 20 nt to about 25 nt, from about 25 nt to about 30 nt, from about 30 nt to about 35 nt, from about 35 nt to about 40 nt, from about 40 nt to about 50 nt, from about 50 nt to about 60 nt, from about 60 nt to about 70 nt, from about 70 nt to about 80 nt, from about 80 nt to about 90 nt, or from about 90 nt to about 100 nt. In some embodiments, the linker of a single-molecule guide RNA is 4 nt.

[0150] An exemplary single-molecule guide RNA comprises two complementary stretches of nucleotides that hybridize to form a dsRNA duplex. In some embodiments, one of the two complementary stretches of nucleotides of the single-molecule guide RNA (or the DNA encoding the stretch) is at least about 60% identical to one of the activator-RNA (tracrRNA) molecules set forth in Supplementary Table S5, or a complement thereof, over a stretch of at least 8 contiguous nucleotides. For example, one of the two complementary stretches of nucleotides of the single-molecule guide RNA (or the DNA encoding the stretch) is at least about 65% identical, at least about 70% identical, at least about 75% identical, at least about 80% identical, at least about 85% identical, at least about 90% identical, at least about 95% identical, at least about 98% identical, at least about 99% identical or 100° A) identical to one of the tracrRNA sequences set forth in Supplementary Table S5, or a complement thereof, over a stretch of at least 8 contiguous, at least 9 contiguous, at least 10 contiguous, at least 11 contiguous, at least 12 contiguous, at least 13 contiguous, at least 14 contiguous or at least 15 contiguous nucleotides. For example, the single-molecule guide RNA may comprise a nucleotide sequence that is at least 70% identical over at least 10 contiguous nucleotides, at least 80% identical over at least 10 contiguous nucleotides, at least 70% identical over at least 11 contiguous nucleotides, at least 80% identical over at least 11 contiguous nucleotides, at least 70% identical over at least 12 contiguous nucleotides, or at least 80% identical over at least 12 contiguous nucleotides of one of the tracrRNA sequences set forth in Supplementary Table S5.

[0151] In some embodiments, one of the two complementary stretches of nucleotides of the single-molecule guide RNA (or the DNA encoding the stretch) is at least about 60% identical to one of the targeter-RNA (crRNA/CRISPR repeat) sequences set forth in Supplementary Table S5, or a complement thereof, over a stretch of at least 8 contiguous nucleotides. For example, one of the two complementary stretches of nucleotides of the single-molecule guide RNA (or the DNA encoding the stretch) is at least about 65% identical, at least about 70% identical, at least about 75% identical, at least about 80% identical, at least about 85% identical, at least about 90% identical, at least about 95% identical, at least about 98% identical, at least about 99% identical or 100% identical to one of the crRNA/CRISPR repeat sequences set forth in Supplementary Table S5, or a complement thereof, over a stretch of at least 8 contiguous, at least 9 contiguous, at least 10 contiguous, at least 11 contiguous, at least 12 contiguous, at least 13 contiguous, at least 14 contiguous or at least 15 contiguous nucleotides. For example, the single-molecule guide RNA may comprise a nucleotide sequence that is at least 70% identical over at least 10 contiguous nucleotides, at least 80% identical over at least 10 contiguous nucleotides, at least 70% identical over at least 11 contiguous nucleotides, at least 80% identical over at least 11 contiguous nucleotides, at least 70% identical over at least 12 contiguous nucleotides, or at least 80% identical over at least 12 contiguous nucleotides, or at least about 80% identical to about 13 contiguous nucleotides, or at least about 80% identical to about 14 contiguous nucleotides, or at least about 80% identical to about 15 contiguous nucleotides, or at least about 80% identical to about 16 contiguous nucleotides, or at least about 80% identical to about 17 contiguous nucleotides of one of the CRISPR repeat sequences set forth in Supplementary Table S5.

[0152] Appropriate naturally occurring cognate pairs of crRNAs and tracrRNAs can be routinely determined by taking into account the species name and base-pairing (for the dsRNA duplex of the protein-binding domain) when determining appropriate cognate pairs. Non-cognate pairs are also contemplated for use in the invention. In some embodiments of non-cognate pairs, each RNA is from a Cas9 cluster herein wherein the Cas9 endonucleases share 80% identity over 80% of their amino acid sequences.

[0153] Artificial sequences that share very little identity (roughly 50% identity, or alternatively about 70% identity over about 50% of the full length protein) with naturally occurring a tracrRNAs and crRNAs can function with Cas9 to cleave target DNA as long as the structure of the protein-binding domain of the guide RNA is conserved. Thus, RNA folding structure of a naturally occurring protein-binding domain of a DNA-targeting RNA can be taken into account in order to design artificial protein-binding domains (either two-molecule or single-molecule versions). As structures can readily be produced by one of ordinary skill in the art for any naturally occurring crRNA:tracrRNA pair from any, an artificial DNA-targeting-RNA can be designed to mimic the natural structure for a given species when using the Cas9 (or a related Cas9) from that species. Thus, a suitable guide RNA can be an artificially designed RNA (non-naturally occurring) comprising a protein-binding domain that was designed to mimic the structure of a protein-binding domain of a naturally occurring guide RNA.

[0154] The protein-binding segment can have a length of from about 10 nucleotides to about 100 nucleotides. For example, the protein-binding segment can have a length of from about 15 nucleotides (nt) to about 80 nt, from about 15 nt to about 50 nt, from about 15 nt to about 40 nt, from about 15 nt to about 30 nt or from about 15 nt to about 25 nt.

[0155] Also with regard to both a single-molecule guide RNA and to a double-molecule guide RNA, the dsRNA duplex of the protein-binding segment can have a length from about 6 base pairs (bp) to about 50 bp. For example, the dsRNA duplex of the protein-binding segment can have a length from about 6 bp to about 40 bp, from about 6 bp to about 30 bp, from about 6 bp to about 25 bp, from about 6 bp to about 20 bp, from about 6 bp to about 15 bp, from about 8 bp to about 40 bp, from about 8 bp to about 30 bp, from about 8 bp to about 25 bp, from about 8 bp to about 20 bp or from about 8 bp to about 15 bp. For example, the dsRNA duplex of the protein-binding segment can have a length from about from about 8 bp to about 10 bp, from about 10 bp to about 15 bp, from about 15 bp to about 18 bp, from about 18 bp to about 20 bp, from about 20 bp to about 25 bp, from about 25 bp to about 30 bp, from about 30 bp to about 35 bp, from about 35 bp to about 40 bp, or from about 40 bp to about 50 bp. In some embodiments, the dsRNA duplex of the protein-binding segment has a length of 36 base pairs. The percent complementarity between the nucleotide sequences that hybridize to form the dsRNA duplex of the protein-binding segment can be at least about 60%. For example, the percent complementarity between the nucleotide sequences that hybridize to form the dsRNA duplex of the protein-binding segment can be at least about 65%, at least about 70%, at least about 75%, at least about 80%, at least about 85%, at least about 90%, at least about 95%, at least about 98%, or at least about 99%. In some cases, the percent complementarity between the nucleotide sequences that hybridize to form the dsRNA duplex of the protein-binding segment is 100%.

[0156] Site-Directed Modifying Polypeptide

[0157] A guide RNA and a site-directed modifying polypeptide form a complex. The guide RNA provides target specificity to the complex by comprising a nucleotide sequence that is complementary to a sequence of a target DNA (as noted above). The site-directed modifying polypeptide is guided to a DNA sequence (e.g. a chromosomal sequence or an extrachromosomal sequence, e.g. an episomal sequence, a minicircle sequence, a mitochondrial sequence, a chloroplast sequence, etc.) by virtue of its association with at least the protein-binding segment of the guide RNA (described above).

[0158] A site-directed modifying polypeptide modifies target DNA (e.g., cleavage or methylation of target DNA) and/or a polypeptide associated with target DNA (e.g., methylation or acetylation of a histone tail). A site-directed modifying polypeptide is also referred to herein as a “site-directed polypeptide” or an “RNA binding site-directed modifying polypeptide.” In some cases, the site-directed modifying polypeptide is a naturally-occurring modifying polypeptide. In other cases, the site-directed modifying polypeptide is not a naturally-occurring polypeptide (e.g., a chimeric polypeptide as discussed below or a naturally-occurring polypeptide that is modified, e.g., mutation, deletion, insertion).

[0159] Naturally-occurring site-directed modifying polypeptides bind a guide RNA, are thereby directed to a specific sequence within a target DNA, and cleave the target DNA to generate a double strand break. The amino acid sequences of exemplary naturally-occurring Cas9 site-directed modifying polypeptide orthologs are set out in SEQ ID NOs: 1-800. The amino acid sequence of the S. pyrogens Cas9 endonuclease is set out in SEQ ID NO: 8. A site-directed modifying polypeptide comprises two portions, an RNA-binding portion and an activity portion. In some embodiments, a site-directed modifying polypeptide comprises: (i) an RNA-binding portion that interacts with a guide RNA, wherein the guide RNA comprises a nucleotide sequence that is complementary to a sequence in a target DNA; and (ii) an activity portion that exhibits site-directed enzymatic activity (e.g., activity for DNA methylation, activity for DNA cleavage, activity for histone acetylation, activity for histone methylation, etc.), wherein the site of enzymatic activity is determined by the guide RNA.

[0160] In other embodiments, a site-directed modifying polypeptide comprises: (i) an RNA-binding portion that interacts with a guide RNA, wherein the guide RNA comprises a nucleotide sequence that is complementary to a sequence in a target DNA; and (ii) an activity portion that modulates transcription within the target DNA (e.g., to increase or decrease transcription), wherein the site of modulated transcription within the target DNA is determined by the guide RNA.

[0161] In some cases, a site-directed modifying polypeptide has enzymatic activity that modifies target DNA (e.g., nuclease activity, methyltransferase activity, demethylase activity, DNA repair activity, DNA damage activity, deamination activity, dismutase activity, alkylation activity, depurination activity, oxidation activity, pyrimidine dimer forming activity, integrase activity, transposase activity, recombinase activity, polymerase activity, ligase activity, helicase activity, photolyase activity or glycosylase activity).

[0162] In other cases, a site-directed modifying polypeptide has enzymatic activity that modifies a polypeptide (e.g., a histone) associated with target DNA (e.g., methyltransferase activity, demethylase activity, acetyltransferase activity, deacetylase activity, kinase activity, phosphatase activity, ubiquitin ligase activity, deubiquitinating activity, adenylation activity, deadenylation activity, SUMOylating activity, deSUMOylating activity, ribosylation activity, deribosylation activity, myristoylation activity or demyristoylation activity).

[0163] Exemplary Site-Directed Modifying Polypeptides

[0164] In some cases, the site-directed modifying polypeptide comprises an amino acid sequence having at least about 75%, at least about 80%, at least about 85%, at least about 90%, at least about 95%, at least about 99%, or 100%, amino acid sequence identity to amino acids 7-166 and/or 731-1003 of SEQ ID NO: 8, or to the corresponding portions in any of the amino acid sequences set forth as SEQ ID NOs: 1-800.

[0165] Nucleic Acid Modifications

[0166] In some embodiments, a nucleic acid (e.g., a guide RNA) comprises one or more modifications, e.g., a base modification, a backbone modification, etc, to provide the nucleic acid with a new or enhanced feature (e.g., improved stability). As is known in the art, a nucleoside is a base-sugar combination. The base portion of the nucleoside is normally a heterocyclic base. The two most common classes of such heterocyclic bases are the purines and the pyrimidines. Nucleotides are nucleosides that further include a phosphate group covalently linked to the sugar portion of the nucleoside. For those nucleosides that include a pentofuranosyl sugar, the phosphate group can be linked to the 2′, the 3′, or the 5′ hydroxyl moiety of the sugar. In forming oligonucleotides, the phosphate groups covalently link adjacent nucleosides to one another to form a linear polymeric compound. In turn, the respective ends of this linear polymeric compound can be further joined to form a circular compound, however, linear compounds are generally suitable. In addition, linear compounds may have internal nucleotide base complementarity and may therefore fold in a manner as to produce a fully or partially double-stranded compound. Within oligonucleotides, the phosphate groups are commonly referred to as forming the internucleoside backbone of the oligonucleotide. The normal linkage or backbone of RNA and DNA is a 3′ to 5′ phosphodiester linkage.

[0167] Modified Backbones and Modified Internucleoside Linkages

[0168] Examples of suitable nucleic acids containing modifications include nucleic acids containing modified backbones or non-natural internucleoside linkages. Nucleic acids having modified backbones include those that retain a phosphorus atom in the backbone and those that do not have a phosphorus atom in the backbone.

[0169] Suitable modified oligonucleotide backbones containing a phosphorus atom therein include, for example, phosphorothioates, chiral phosphorothioates, phosphorodithioates, phosphotriesters, aminoalkylphosphotriesters, methyl and other alkyl phosphonates including 3′-alkylene phosphonates, 5′-alkylene phosphonates and chiral phosphonates, phosphinates, phosphoramidates including 3¹-amino phosphoramidate and aminoalkylphosphoramidates, phosphorodiamidates, thionophosphoramidates, thionoalkylphosphonates, thionoalkylphosphotriesters, selenophosphates and boranophosphates having normal 3′-5′ linkages, 2′-5′ linked analogs of these, and those having inverted polarity wherein one or more internucleotide linkages is a 3′ to 3′, 5′ to 5′ or 2′ to 2′ linkage. Suitable oligonucleotides having inverted polarity comprise a single 3′ to 3′ linkage at the 3-most internucleotide linkage i.e. a single inverted nucleoside residue which may be a basic (the nucleobase is missing or has a hydroxyl group in place thereof). Various salts (such as, for example, potassium or sodium), mixed salts and free acid forms are also included.

[0170] In some embodiments, a nucleic acid comprises one or more phosphorothioate and/or heteroatom internucleoside linkages, in particular —CH₂—NH—O—CH₂—, —CH₂—N(CH₃)—O—CH₂— (known as a methylene (methylimino) or MMI backbone), —CH₂—O—N(CH₃)—CH₂—, —CH₂—N(CH₃)—N(CH₃)—CH₂— and —O—N(CH₃)—CH₂—CH₂— (wherein the native phosphodiester internucleotide linkage is represented as —O—P(═O)(OH)—O—CH₂—). MMI type internucleoside linkages are disclosed in the above referenced U.S. Pat. No. 5,489,677. Suitable amide internucleoside linkages are disclosed in t U.S. Pat. No. 5,602,240.

[0171] Also suitable are nucleic acids having morpholino backbone structures as described in, e.g., U.S. Pat. No. 5,034,506. For example, in some embodiments, a nucleic acid comprises a 6-membered morpholino ring in place of a ribose ring. In some of these embodiments, a phosphorodiamidate or other non-phosphodiester internucleoside linkage replaces a phosphodiester linkage.

[0172] Suitable modified polynucleotide backbones that do not include a phosphorus atom therein have backbones that are formed by short chain alkyl or cycloalkyl internucleoside linkages, mixed heteroatom and alkyl or cycloalkyl internucleoside linkages, or one or more short chain heteroatomic or heterocyclic internucleoside linkages. These include those having morpholino linkages (formed in part from the sugar portion of a nucleoside); siloxane backbones; sulfide, sulfoxide and sulfone backbones; formacetyl and thioformacetyl backbones; methylene formacetyl and thioformacetyl backbones; riboacetyl backbones; alkene containing backbones; sulfamate backbones; methyleneimino and methylenehydrazino backbones; sulfonate and sulfonamide backbones; amide backbones; and others having mixed N, O, S and CH₂ component parts.

[0173] Mimetics

[0174] A nucleic acid can be a nucleic acid mimetic. The term “mimetic” as it is applied to polynucleotides is intended to include polynucleotides wherein only the furanose ring or both the furanose ring and the internucleotide linkage are replaced with non-furanose groups, replacement of only the furanose ring is also referred to in the art as being a sugar surrogate. The heterocyclic base moiety or a modified heterocyclic base moiety is maintained for hybridization with an appropriate target nucleic acid. One such nucleic acid, a polynucleotide mimetic that has been shown to have excellent hybridization properties, is referred to as a peptide nucleic acid (PNA). In PNA, the sugar-backbone of a polynucleotide is replaced with an amide containing backbone, in particular an aminoethylglycine backbone. The nucleotides are retained and are bound directly or indirectly to aza nitrogen atoms of the amide portion of the backbone.

[0175] One polynucleotide mimetic that has been reported to have excellent hybridization properties is a peptide nucleic acid (PNA). The backbone in PNA compounds is two or more linked aminoethylglycine units which gives PNA an amide containing backbone. The heterocyclic base moieties are bound directly or indirectly to aza nitrogen atoms of the amide portion of the backbone. Representative U.S. patents that describe the preparation of PNA compounds include, but are not limited to: U.S. Pat. Nos. 5,539,082; 5,714,331; and 5,719,262.

[0176] Another class of polynucleotide mimetic that has been studied is based on linked morpholino units (morpholino nucleic acid) having heterocyclic bases attached to the morpholino ring. A number of linking groups have been reported that link the morpholino monomeric units in a morpholino nucleic acid. One class of linking groups has been selected to give a non-ionic oligomeric compound. The non-ionic morpholino-based oligomeric compounds are less likely to have undesired interactions with cellular proteins. Morpholino-based polynucleotides are nonionic mimics of oligonucleotides which are less likely to form undesired interactions with cellular proteins (Dwaine A. Braasch and David R. Corey, Biochemistry, 2002, 41(14), 45034510). Morpholino-based polynucleotides are disclosed in U.S. Pat. No. 5,034,506. A variety of compounds within the morpholino class of polynucleotides have been prepared, having a variety of different linking groups joining the monomeric subunits.

[0177] A further class of polynucleotide mimetic is referred to as cyclohexenyl nucleic acids (CeNA). The furanose ring normally present in a DNA/RNA molecule is replaced with a cyclohexenyl ring. CeNA DMT protected phosphoramidite monomers have been prepared and used for oligomeric compound synthesis following classical phosphoramidite chemistry. Fully modified CeNA oligomeric compounds and oligonucleotides having specific positions modified with CeNA have been prepared and studied (see Wang et al., J. Am. Chem. Soc., 2000, 122, 85958602). In general the incorporation of CeNA monomers into a DNA chain increases its stability of a DNA/RNA hybrid. CeNA oligoadenylates formed complexes with RNA and DNA complements with similar stability to the native complexes. The study of incorporating CeNA structures into natural nucleic acid structures was shown by NMR and circular dichroism to proceed with easy conformational adaptation.

[0178] A further modification includes Locked Nucleic Acids (LNAs) in which the 2′-hydroxyl group is linked to the 4′ carbon atom of the sugar ring thereby forming a 2′-C,4′-C-oxymethylene linkage thereby forming a bicyclic sugar moiety. The linkage can be a methylene (—CH₂—), group bridging the 2′ oxygen atom and the 4′ carbon atom wherein n is 1 or 2 (Singh et al., Chem. Commun., 1998, 4, 455-456). LNA and LNA analogs display very high duplex thermal stabilities with complementary DNA and RNA (Tm=+3 to +10° C.), stability towards 3′-exonucleolytic degradation and good solubility properties. Potent and nontoxic antisense oligonucleotides containing LNAs have been described (Wahlestedt et al., Proc. Natl. Acad. Sci. U.S.A., 2000, 97, 5633-5638).

[0179] The synthesis and preparation of the LNA monomers adenine, cytosine, guanine, 5-methylcytosine, thymine and uracil, along with their oligomerization, and nucleic acid recognition properties have been described (Koshkin et al., Tetrahedron, 1998, 54, 3607-3630). LNAs and preparation thereof are also described in WO 98/39352 and WO 99/14226.

[0180] Modified Sugar Moieties

[0181] A nucleic acid can also include one or more substituted sugar moieties. Suitable polynucleotides comprise a sugar substituent group selected from: OH; F; O-, S-, or N-alkyl; O-, S-, or N-alkenyl; O-, S- or N-alkynyl; or O-alkyl-O-alkyl, wherein the alkyl, alkenyl and alkynyl may be substituted or unsubstituted C.sub.1 to C₁₀ alkyl or C₂ to C₁₀ alkenyl and alkynyl. Particularly suitable are O((CH₂)ₙO)ₘCH₃, O(CH₂)ₙOCH₃, O(CH₂)ₙNH₂, O(CH₂)CH₃, O(CH₂)ₙONH₂, and O(CH₂)ₙON((CH₂)ₙCH₃)₂, where n and m are from 1 to about 10. Other suitable polynucleotides comprise a sugar substituent group selected from: C₁ to C₁₀ lower alkyl, substituted lower alkyl, alkenyl, alkynyl, alkaryl, aralkyl, O-alkaryl or O-aralkyl, SH, SCH₃, OCN, Cl, Br, CN, CF₃, OCF₃, SOCH₃, SO₂CH₃, ONO₂, NO₂, N₃, NH₂, heterocycloalkyl, heterocycloalkaryl, aminoalkylamino, polyalkylamino, substituted silyl, an RNA cleaving group, a reporter group, an intercalator, a group for improving the pharmacokinetic properties of an oligonucleotide, or a group for improving the pharmacodynamic properties of an oligonucleotide, and other substituents having similar properties. A suitable modification includes 2′-methoxyethoxy 2′-O—CH₂ CH₂OCH₃, also known as -2′-O-(2-methoxyethyl) or 2′-MOE) (Martin et al., Hely. Chinn. Acta, 1995, 78, 486-504) i.e., an alkoxyalkoxy group. A further suitable modification includes 2′-dimethylaminooxyethoxy, i.e., a O(CH₂)₂ON(CH₃)₂ group, also known as 2′-DMAOE, as described in examples hereinbelow, and 2′-dimethylaminoethoxyethoxy (also known in the art as 2′-O-dimethyl-amino-ethoxy-ethyl or 2′-DMAEOE), i.e., 2′-O—CH₂—O—CH₂—N(CH₃)₂.

[0182] Other suitable sugar substituent groups include methoxy (—O—CH₃), aminopropoxy (—O—CH₂CH₂ CH₂NH₂), allyl (—CH₂—CH═CH₂), —O-allyl(-O—CH₂—CH═CH₂) and fluoro (F). 2′-sugar substituent groups may be in the arabino (up) position or ribo (down) position. A suitable 2′-arabino modification is 2′-F. Similar modifications may also be made at other positions on the oligomeric compound, particularly the 3′ position of the sugar on the 3′ terminal nucleoside or in 2′-5′ linked oligonucleotides and the 5′ position of 5′ terminal nucleotide. Oligomeric compounds may also have sugar mimetics such as cyclobutyl moieties in place of the pentofuranosyl sugar.

[0183] Base Modifications and Substitutions

[0184] A nucleic acid may also include nucleobase (often referred to in the art simply as “base”) modifications or substitutions. As used herein, “unmodified” or “natural” nucleobases include the purine bases adenine (A) and guanine (G), and the pyrimidine bases thymine (T), cytosine (C) and uracil (U). Modified nucleobases include other synthetic and natural nucleobases such as 5-methylcytosine (5-me-C), 5-hydroxymethyl cytosine, xanthine, hypoxanthine, 2-aminoadenine, 6-methyl and other alkyl derivatives of adenine and guanine, 2-propyl and other alkyl derivatives of adenine and guanine, 2-thiouracil, 2-thiothymine and 2-thiocytosine, 5-halouracil and cytosine, 5-propynyl (—C═C—CH₃) uracil and cytosine and other alkynyl derivatives of pyrimidine bases, 6-azo uracil, cytosine and thymine, 5-uracil (pseudouracil), 4-thiouracil, 8-halo, 8-amino, 8-thiol, 8-thioalkyl, 8-hydroxyl and other 8-substituted adenines and guanines, 5-halo particularly 5-bromo, 5-trifluoromethyl and other 5-substituted uracils and cytosines, 7-methylguanine and 7-methyladenine, 2-F-adenine, 2-amino-adenine, 8-azaguanine and 8-azaadenine, 7-deazaguanine and 7-deazaadenine and 3-deazaguanine and 3-deazaadenine. Further modified nucleobases include tricyclic pyrimidines such as phenoxazine cytidine(1H-pyrimido(5,4-b)(1,4)benzoxazin-2(3H)-one), phenothiazine cytidine (1H-pyrimido(5,4-b)(1,4)benzothiazin-2(3H)-one), G-clamps such as a substituted phenoxazine cytidine (e.g. 9-(2-aminoethoxy)-H-pyrimido(5,4-(b) (1,4)benzoxazin-2(3H)-one), carbazole cytidine (2H-pyrimido(4,5-b)indol-2-one), pyridoindole cytidine (H-pyrido(3′,2′:4,5)pyrrolo(2,3-d)pyrimidin-2-one).

[0185] Heterocyclic base moieties may also include those in which the purine or pyrimidine base is replaced with other heterocycles, for example 7-deaza-adenine, 7-deazaguanosine, 2-aminopyridine and 2-pyridone. Further nucleobases include those disclosed in U.S. Pat. No. 3,687,808, those disclosed in The Concise Encyclopedia Of Polymer Science And Engineering, pages 858-859, Kroschwitz, J. I., ed. John Wiley & Sons, 1990, those disclosed by Englisch et al., Angewandte Chemie, International Edition, 1991, 30, 613, and those disclosed by Sanghvi, Y. S., Chapter 15, Antisense Research and Applications, pages 289-302, Crooke, S. T. and Lebleu, B., ed., CRC Press, 1993. Certain of these nucleobases are useful for increasing the binding affinity of an oligomeric compound. These include 5-substituted pyrimidines, 6-azapyrimidines and N-2, N-6 and O-6 substituted purines, including 2-aminopropyladenine, 5-propynyluracil and 5-propynylcytosine. 5-methylcytosine substitutions have been shown to increase nucleic acid duplex stability by 0.6-1.2° C. (Sanghvi et al., eds., Antisense Research and Applications, CRC Press, Boca Raton, 1993, pp. 276-278) and are suitable base substitutions, e.g., when combined with 2′-O-methoxyethyl sugar modifications.

[0186] “Complementary” refers to the capacity for pairing, through base stacking and specific hydrogen bonding, between two sequences comprising naturally or non-naturally occurring (e.g., modified as described above) bases (nucleosides) or analogs thereof. For example, if a base at one position of a nucleic acid is capable of hydrogen bonding with a base at the corresponding position of a target, then the bases are considered to be complementary to each other at that position. Nucleic acids can comprise universal bases, or inert abasic spacers that provide no positive or negative contribution to hydrogen bonding. Base pairings may include both canonical Watson-Crick base pairing and non-Watson-Crick base pairing (e.g., Wobble base pairing and Hoogsteen base pairing). It is understood that for complementary base pairings, adenosine-type bases (A) are complementary to thymidine-type bases (T) or uracil-type bases (U), that cytosine-type bases (C) are complementary to guanosine-type bases (G), and that universal bases such as such as 3-nitropyrrole or 5-nitroindole can hybridize to and are considered complementary to any A, C, U, or T. Nichols et al., Nature, 1994; 369:492-493 and Loakes et al., Nucleic Acids Res., 1994; 22:4039-4043. Inosine (I) has also been considered in the art to be a universal base and is considered complementary to any A, C, U, or T. See Watkins and SantaLucia, Nucl. Acids Research, 2005; 33 (19): 6258-6267.

[0187] Conjugates

[0188] Another possible modification of a nucleic acid involves chemically linking to the polynucleotide one or more moieties or conjugates which enhance the activity, cellular distribution or cellular uptake of the oligonucleotide. These moieties or conjugates can include conjugate groups covalently bound to functional groups such as primary or secondary hydroxyl groups. Conjugate groups include, but are not limited to, intercalators, reporter molecules, polyamines, polyamides, polyethylene glycols, polyethers, groups that enhance the pharmacodynamic properties of oligomers, and groups that enhance the pharmacokinetic properties of oligomers. Suitable conjugate groups include, but are not limited to, cholesterols, lipids, phospholipids, biotin, phenazine, folate, phenanthridine, anthraquinone, acridine, fluoresceins, rhodamines, coumarins, and dyes. Groups that enhance the pharmacodynamic properties include groups that improve uptake, enhance resistance to degradation, and/or strengthen sequence-specific hybridization with the target nucleic acid. Groups that enhance the pharmacokinetic properties include groups that improve uptake, distribution, metabolism or excretion of a nucleic acid.

[0189] Conjugate moieties include but are not limited to lipid moieties such as a cholesterol moiety (Letsinger et al., Proc. Natl. Acad. Sci. USA, 1989, 86, 6553-6556), cholic acid (Manoharan et al., Bioorg. Med. Chem. Let., 1994, 4, 1053-1060), a thioether, e.g., hexyl-S-tritylthiol (Manoharan et al., Ann. N.Y. Acad. Sci., 1992, 660, 306-309; Manoharan et al., Bioorg. Med. Chem. Let., 1993, 3, 2765-2770), a thiocholesterol (Oberhauser et al., Nucl. Acids Res., 1992, 20, 533-538), an aliphatic chain, e.g., dodecandiol or undecyl residues (Saison-Behmoaras et al., EMBO J., 1991, 10, 1111-1118; Kabanov et al., FEBS Lett., 1990, 259, 327-330; Svinarchuk et al., Biochimie, 1993, 75, 49-54), a phospholipid, e.g., di-hexadecyl-rac-glycerol or triethylammonium 1,2-di-O-hexadecyl-rac-glycero-3-H-phosphonate (Manoharan et al., Tetrahedron Lett., 1995, 36, 3651-3654; Shea et al., Nucl. Acids Res., 1990, 18, 3777-3783), a polyamine or a polyethylene glycol chain (Manoharan et al., Nucleosides & Nucleotides, 1995, 14, 969-973), or adamantane acetic acid (Manoharan et al., Tetrahedron Lett., 1995, 36, 36513654), a palmityl moiety (Mishra et al., Biochim. Biophys. Acta, 1995, 1264, 229-237), or an octadecylamine or hexylamino-carbonyl-oxycholesterol moiety (Crooke et al., J. Pharmacol. Exp. Ther., 1996, 277, 923-937.\

[0190] A conjugate may include a “Protein Transduction Domain” or PTD (also known as a CPP—cell penetrating peptide), which may refer to a polypeptide, polynucleotide, carbohydrate, or organic or inorganic compound that facilitates traversing a lipid bilayer, micelle, cell membrane, organelle membrane, or vesicle membrane. A PTD attached to another molecule, which can range from a small polar molecule to a large macromolecule and/or a nanoparticle, facilitates the molecule traversing a membrane, for example going from extracellular space to intracellular space, or cytosol to within an organelle. In some embodiments, a PTD is covalently linked to the amino terminus of an exogenous polypeptide (e.g., a site-directed modifying polypeptide). In some embodiments, a PTD is covalently linked to the carboxyl terminus of an exogenous polypeptide (e.g., a site-directed modifying polypeptide). In some embodiments, a PTD is covalently linked to a nucleic acid (e.g., a guide RNA, a polynucleotide encoding a guide RNA, a polynucleotide encoding a site-directed modifying polypeptide, etc.). Exemplary PTDs include but are not limited to a minimal undecapeptide protein transduction domain (corresponding to residues 47-57 of HIV-1 TAT comprising YGRKKRRQRRR; a polyarginine sequence comprising a number of arginines sufficient to direct entry into a cell (e.g., 3, 4, 5, 6, 7, 8, 9, 10, or 10-50 arginines); a VP22 domain (Zender et al. (2002) Cancer Gene Ther. 9(6):489-96); an Drosophila Antennapedia protein transduction domain (Noguchi et al. (2003) Diabetes 52(7):1732-1737); a truncated human calcitonin peptide (Trehin et al. (2004) Pharm. Research 21:1248-1256); polylysine (Wender et al. (2000) Proc. Natl. Acad. Sci. USA 97:13003-13008); RRQRRTSKLMKR; Transport=GWTLNSAGYLLGKINLKALAALAKKIL; KALAWEAKLAKALAKALAKHLAKALAKALKCEA; and RQIKIWFQNRRMKWKK. Exemplary PTDs include but are not limited to, YGRKKRRQRRR; RKKRRQRRR; an arginine homopolymer of from 3 arginine residues to 50 arginine residues; Exemplary PTD domain amino acid sequences include, but are not limited to, any of the following: YGRKKRRQRRR; RKKRRQRR; YARAAARQARA; THRLPRRRRRR; and GGRRARRRRRR. In some embodiments, the PTD is an activatable CPP (ACPP) (Aguilera et al. (2009) Integr Biol (Camb) June; 1(5-6): 371-381). ACPPs comprise a polycationic CPP (e.g., Arg9 or “R9”) connected via a cleavable linker to a matching polyanion (e.g., Glu9 or “E9”), which reduces the net charge to nearly zero and thereby inhibits adhesion and uptake into cells. Upon cleavage of the linker, the polyanion is released, locally unmasking the polyarginine and its inherent adhesiveness, thus “activating” the ACPP to traverse the membrane.

[0191] Exemplary Guide RNAs

[0192] In some embodiments, a guide RNA comprises two separate RNA polynucleotide molecules. The first of the two separate RNA polynucleotide molecules (the activator-RNA) comprises a nucleotide sequence having at least about 60%, at least about 65%, at least about 70%, at least about 75%, at least about 80%, at least about 85%, at least about 90%, at least about 95%, at least about 98%, at least about 99%, or 100% nucleotide sequence identity over a stretch of at least 8 contiguous, at least 9 contiguous, at least 10 contiguous, at least 11 contiguous, at least 12 contiguous, at least 13 contiguous, at least 14 contiguous or at least 15 contiguous nucleotides to any one of the tracrRNA nucleotide sequences set forth in Supplementary Table S5, or complements thereof. The second of the two separate RNA polynucleotide molecules (the targeter-RNA) comprises a nucleotide sequence having at least about 60%, at least about 65%, at least about 70%, at least about 75%, at least about 80%, at least about 85%, at least about 90%, at least about 95%, at least about 98%, at least about 99%, or 100% nucleotide sequence identity over a stretch of at least 8 contiguous, at least 9 contiguous, at least 10 contiguous, at least 11 contiguous, at least 12 contiguous, at least 13 contiguous, at least 14 contiguous or at least 15 contiguous nucleotides to the cognate CRISPR repeat nucleotide sequence set forth in Supplementary Table S5, or complements thereof. In some embodiments, a suitable guide RNA is a single-molecule RNA polynucleotide and comprises a first nucleotide sequence having at least about 60%, at least about 65%, at least about 70%, at least about 75%, at least about 80%, at least about 85%, at least about 90%, at least about 95%, at least about 98%, at least about 99%, or 100% nucleotide sequence identity over a stretch of at least 8 contiguous, at least 9 contiguous, at least 10 contiguous, at least 11 contiguous, at least 12 contiguous, at least 13 contiguous, at least 14 contiguous or at least 15 contiguous nucleotides to any one of the tracrRNA nucleotide sequences set forth in Supplementary Table S5 and a second nucleotide sequence having at least about 60%, at least about 65%, at least about 70%, at least about 75%, at least about 80%, at least about 85%, at least about 90%, at least about 95%, at least about 98%, at least about 99%, or 100% nucleotide sequence identity over a stretch of at least 8 contiguous, at least 9 contiguous, at least 10 contiguous, at least 11 contiguous, at least 12 contiguous, at least 13 contiguous, at least 14 contiguous or at least 15 contiguous nucleotides to the cognate CRISPR repeat nucleotide sequence set forth in Supplementary Table S5, or complements thereof.

[0193] In some embodiments, the single-molecule guide RNAs comprise a DNA-targeting segment and a protein-binding segment complementary thereto, wherein the protein-binding segment comprises a tracrRNA set out in Supplementary Table S5 or wherein the protein-binding segment comprises a tracrRNA at least 80% identical over at least 20 nucleotides to a tracrRNA set out in Supplementary Table S5, or at least about 60%, at least about 65%, at least about 70%, at least about 75%, at least about 80%, at least about 85%, at least about 90%, at least about 95%, at least about 98%, at least about 99%, or 100% nucleotide sequence identity over a stretch of at least 8 contiguous, at least 9 contiguous, at least 10 contiguous, at least 11 contiguous, at least 12 contiguous, at least 13 contiguous, at least 14 contiguous or at least 15 contiguous nucleotides of any one of the tracrRNA nucleotide sequences set forth in Supplementary Table S5. For example, the protein-binding segment may comprise a tracrRNA at least 70% identical over at least 10 contiguous nucleotides, at least 80% identical over at least 10 contiguous nucleotides, at least 70% identical over at least 11 contiguous nucleotides, at least 80% identical over at least 11 contiguous nucleotides, at least 70% identical over at least 12 contiguous nucleotides, or at least 80% identical over at least 12 contiguous nucleotides.

[0194] In some embodiments, the single-molecule guide RNAs comprise a DNA-targeting segment and a protein-binding segment, wherein the protein-binding segment comprises a tracrRNA set out in Supplementary Table S5 or wherein the protein-binding segment comprises a tracrRNA at least 80% identical over at least 20 nucleotides to a tracrRNA set out in Supplementary Table S5. In some embodiments, the protein-binding segment comprises a CRISPR repeat set out in Supplementary Table S5 that is the CRISPR repeat cognate to the tracrRNA of the protein-binding segment. In some embodiments, the DNA-targeting segment comprises RNA complementary to a protospacer-like sequence in a target DNA 5′ to a PAM sequence. In some embodiments, the tracrRNA and CRISPR repeat are respectively the C. jejuni tracrRNA and its cognate CRISPR repeat set out in Supplementary Table S5 and the PAM sequence is NNNNACA. In some embodiments, the tracrRNA and CRISPR repeat are respectively at least 80% identical to the C. jejuni tracrRNA and its cognate CRISPR repeat set out in Supplementary Table S5 and the PAM sequence is NNNNACA. In some embodiments, the single-molecule guide RNA comprises a sequence that hybridizes to a protospacer-like sequence set out in one of SEQ ID NOs: 801-2701.

[0195] In some embodiments, the double-molecule guide RNAs comprise a targeter-RNA and an activator-RNA complementary thereto, wherein the activator-RNA comprises a tracrRNA set out in Supplementary Table S5 or wherein the activator-RNA comprises a tracrRNA at least 80% identical over at least 20 nucleotides to a tracrRNA set out in Supplementary Table S5. In some embodiments, the double-molecule guide RNA comprises a modified backbone, a non-natural internucleoside linkage, a nucleic acid mimetic, a modified sugar moiety, a base modification, a modification or sequence that provides for modified or regulated stability, a modification or sequence that provides for subcellular tracking, a modification or sequence that provides for tracking, or a modification or sequence that provides for a binding site for a protein or protein complex. In some embodiments, the targeter-RNA comprises a CRISPR repeat set out in Supplementary Table S5. In some embodiments, the targeter-RNA comprises a CRISPR repeat set out in Supplementary Table S5 that is the cognate CRISPR repeat of the tracrRNA of the activator-RNA. In some embodiments, the targeter-RNA further comprises RNA complementary to a protospacer-like sequence in a target DNA 5′ to a PAM sequence. In some embodiments, the tracrRNA and CRISPR repeat are respectively the C. jejuni tracrRNA and its cognate CRISPR repeat set out in Supplementary Table S5 and the PAM sequence is NNNNACA. In some embodiments, the tracrRNA and CRISPR repeat are at least 80% identical to respectively the C. jejuni tracrRNA and its cognate CRISPR repeat set out in Supplementary Table S5 and the PAM sequence is NNNNACA. In some embodiments, the double-molecule guide RNA comprises a sequence that hybridizes to a protospacer-like sequence set out in one of SEQ ID NOs: 801-2701.

[0196] Nucleic Acids Encoding a Guide RNA and/or a Site-Directed Modifying Polypeptide

[0197] The present disclosure provides a nucleic acid comprising a nucleotide sequence encoding a guide RNA and/or a site-directed modifying polypeptide. In some embodiments, a guide RNA-encoding nucleic acid is an expression vector, e.g., a recombinant expression vector.

[0198] In some embodiments, a method involves contacting a target DNA or introducing into a cell (or a population of cells) one or more nucleic acids comprising nucleotide sequences encoding a guide RNA and/or a site-directed modifying polypeptide. In some embodiments a cell comprising a target DNA is in vitro. In some embodiments a cell comprising a target DNA is in vivo. Suitable nucleic acids comprising nucleotide sequences encoding a guide RNA and/or a site-directed modifying polypeptide include expression vectors, where an expression vector comprising a nucleotide sequence encoding a guide RNA and/or a site-directed modifying polypeptide is a “recombinant expression vector.”

[0199] In some embodiments, the recombinant expression vector is a viral construct, e.g., a recombinant adeno-associated virus construct (see, e.g., U.S. Pat. No. 7,078,387), a recombinant adenoviral construct, a recombinant lentiviral construct, a recombinant retroviral construct, etc.

[0200] Suitable expression vectors include, but are not limited to, viral vectors (e.g. viral vectors based on vaccinia virus; poliovirus; adenovirus (see, e.g., Li et al., Invest Opthalmol Vis Sci 35:2543 2549, 1994; Borras et al., Gene Ther 6:515 524, 1999; Li and Davidson, PNAS 92:7700 7704, 1995; Sakamoto et al., H Gene Ther 5:1088 1097, 1999; WO 94/12649, WO 93/03769; WO 93/19191; WO 94/28938; WO 95/11984 and WO 95/00655); adeno-associated virus (see, e.g., Ali et al., Hum Gene Ther 9:81 86, 1998, Flannery et al., PNAS 94:6916 6921, 1997; Bennett et al., Invest Opthalmol Vis Sci 38:2857 2863, 1997; Jomary et al., Gene Ther 4:683 690, 1997, Rolling et al., Hum Gene Ther 10:641 648, 1999; Ali et al., Hum Mol Genet 5:591 594, 1996; Srivastava in WO 93/09239, Samulski et al., J. Vir. (1989) 63:3822-3828; Mendelson et al., Virol. (1988) 166:154-165; and Flotte et al., PNAS (1993) 90:10613-10617); SV40; herpes simplex virus; human immunodeficiency virus (see, e.g., Miyoshi et al., PNAS 94:10319 23, 1997; Takahashi et al., J Virol 73:7812 7816, 1999); a retroviral vector (e.g., Murine Leukemia Virus, spleen necrosis virus, and vectors derived from retroviruses such as Rous Sarcoma Virus, Harvey Sarcoma Virus, avian leukosis virus, a lentivirus, human immunodeficiency virus, myeloproliferative sarcoma virus, and mammary tumor virus); and the like.

[0201] Numerous suitable expression vectors are known to those of skill in the art, and many are commercially available. The following vectors are provided by way of example; for eukaryotic host cells: pXT1, pSG5 (Stratagene), pSVK3, pBPV, pMSG, and pSVLSV40 (Pharmacia). However, any other vector may be used so long as it is compatible with the host cell. Depending on the host/vector system utilized, any of a number of suitable transcription and translation control elements, including constitutive and inducible promoters, transcription enhancer elements, transcription terminators, etc. may be used in the expression vector (see e.g., Bitter et al. (1987) Methods in Enzymology, 153:516-544).

[0202] In some embodiments, a nucleotide sequence encoding a guide RNA and/or a site-directed modifying polypeptide is operably linked to a control element, e.g., a transcriptional control element, such as a promoter. The transcriptional control element may be functional in either a eukaryotic cell, e.g., a mammalian cell; or a prokaryotic cell (e.g., bacterial or archaeal cell). In some embodiments, a nucleotide sequence encoding a guide RNA and/or a site-directed modifying polypeptide is operably linked to multiple control elements that allow expression of the nucleotide sequence encoding a guide RNA and/or a site-directed modifying polypeptide in both prokaryotic and eukaryotic cells.

[0203] Non-limiting examples of suitable eukaryotic promoters (promoters functional in a eukaryotic cell) include those from cytomegalovirus (CMV) immediate early, herpes simplex virus (HSV) thymidine kinase, early and late SV40, long terminal repeats (LTRs) from retrovirus, and mouse metallothionein-l. Selection of the appropriate vector and promoter is well within the level of ordinary skill in the art. The expression vector may also contain a ribosome binding site for translation initiation and a transcription terminator. The expression vector may also include appropriate sequences for amplifying expression. The expression vector may also include nucleotide sequences encoding protein tags (e.g., 6×His tag, hemagglutinin tag, green fluorescent protein, etc.) that are fused to the site-directed modifying polypeptide, thus resulting in a chimeric polypeptide.

[0204] In some embodiments, a nucleotide sequence encoding a guide RNA and/or a site-directed modifying polypeptide is operably linked to an inducible promoter. In some embodiments, a nucleotide sequence encoding a guide RNA and/or a site-directed modifying polypeptide is operably linked to a constitutive promoter.

[0205] Methods of introducing a nucleic acid into a host cell are known in the art, and any known method can be used to introduce a nucleic acid (e.g., an expression construct) into a cell. Suitable methods include e.g., viral or bacteriophage infection, transfection, conjugation, protoplast fusion, lipofection, electroporation, calcium phosphate precipitation, polyethyleneimine (PEI)-mediated transfection, DEAE-dextran mediated transfection, liposome-mediated transfection, particle gun technology, calcium phosphate precipitation, direct micro injection, nanoparticle-mediated nucleic acid delivery (see, e.g., Panyam et., al Adv Drug Deliv Rev. 2012 Sep. 13. pii: S0169-409X(12)00283-9. doi: 10.1016/j.addr.2012.09.023), and the like.

[0206] Chimeric Polypeptides

[0207] The present disclosure provides a chimeric site-directed modifying polypeptide. A chimeric site-directed modifying polypeptide interacts with (e.g., binds to) a guide RNA (described above). The guide RNA guides the chimeric site-directed modifying polypeptide to a target sequence within target DNA (e.g. a chromosomal sequence or an extrachromosomal sequence, e.g. an episomal sequence, a minicircle sequence, a mitochondrial sequence, a chloroplast sequence, etc.). A chimeric site-directed modifying polypeptide modifies target DNA (e.g., cleavage or methylation of target DNA) and/or a polypeptide associated with target DNA (e.g., methylation or acetylation of a histone tail).

[0208] A chimeric site-directed modifying polypeptide modifies target DNA (e.g., cleavage or methylation of target DNA) and/or a polypeptide associated with target DNA (e.g., methylation or acetylation of a histone tail). A chimeric site-directed modifying polypeptide is also referred to herein as a “chimeric site-directed polypeptide” or a “chimeric RNA binding site-directed modifying polypeptide.”

[0209] A chimeric site-directed modifying polypeptide comprises two portions, an RNA-binding portion and an activity portion. A chimeric site-directed modifying polypeptide comprises amino acid sequences that are derived from at least two different polypeptides. A chimeric site-directed modifying polypeptide can comprise modified and/or naturally-occurring polypeptide sequences (e.g., a first amino acid sequence from a modified or unmodified Cas9 protein; and a second amino acid sequence other than the Cas9 protein).

[0210] RNA-Binding Portion

[0211] In some cases, the RNA-binding portion of a chimeric site-directed modifying polypeptide is a naturally-occurring polypeptide. In other cases, the RNA-binding portion of a chimeric site-directed modifying polypeptide is not a naturally-occurring molecule (modified, e.g., mutation, deletion, insertion). Naturally-occurring RNA-binding portions of interest are derived from site-directed modifying polypeptides known in the art. For example, SEQ ID NOs: 1-800 provide a non-limiting set of naturally occurring Cas9 endonucleases that can be used as site-directed modifying polypeptides. In some cases, the RNA-binding portion of a chimeric site-directed modifying polypeptide comprises an amino acid sequence having at least about 75%, at least about 80%, at least about 85%, at least about 90%, at least about 95%, at least about 98%, at least about 99%, or 100%, amino acid sequence identity to the RNA-binding portion of a polypeptide set forth in SEQ ID NOs: 1-800.

[0212] In some cases, the site-directed modifying polypeptide comprises an amino acid sequence having at least about 75%, at least about 80%, at least about 85%, at least about 90%, at least about 95%, at least about 99%, or 100%, amino acid sequence identity to amino acids 7-166 and/or 731-1003 of SEQ ID NO: 8, or to the corresponding portions in any of the amino acid sequences set forth as SEQ ID NOs: 1-800.

[0213] Activity Portion

[0214] In addition to the RNA-binding portion, the chimeric site-directed modifying polypeptide comprises an “activity portion.” In some embodiments, the activity portion of a chimeric site-directed modifying polypeptide comprises the naturally-occurring activity portion of a site-directed modifying polypeptide (e.g., Cas9 endonuclease). In other embodiments, the activity portion of a subject chimeric site-directed modifying polypeptide comprises a modified amino acid sequence (e.g., substitution, deletion, insertion) of a naturally-occurring activity portion of a site-directed modifying polypeptide. Naturally-occurring activity portions of interest are derived from site-directed modifying polypeptides known in the art. For example, SEQ ID NOs: 1-800 are a non-limiting set of naturally occurring Cas9 endonucleases that can be used as site-directed modifying polypeptides. The activity portion of a chimeric site-directed modifying polypeptide is variable and may comprise any heterologous polypeptide sequence that may be useful in the methods disclosed herein. In some embodiments, the activity portion of a site-directed modifying polypeptide comprises a portion of a Cas9 ortholog (including, but not limited to, the Cas9 orthologs set out in one of SEQ ID NOs: 1-800) that is at least 90% identical to amino acids 7-166 of SEQ ID NO: 8 and/or at least 90% identical to amino acids 731-1003 of SEQ ID NO: 8. In some embodiments, a chimeric site-directed modifying polypeptide comprises: (i) an RNA-binding portion that interacts with a guide RNA, wherein the guide RNA comprises a nucleotide sequence that is complementary to a sequence in a target DNA; and (ii) an activity portion that exhibits site-directed enzymatic activity (e.g., activity for DNA methylation, activity for DNA cleavage, activity for histone acetylation, activity for histone methylation, etc.), wherein the site of enzymatic activity is determined by the guide RNA.

[0215] In other embodiments, a chimeric site-directed modifying polypeptide comprises: (i) an RNA-binding portion that interacts with a guide RNA, wherein the guide RNA comprises a nucleotide sequence that is complementary to a sequence in a target DNA; and (ii) an activity portion that modulates transcription within the target DNA (e.g., to increase or decrease transcription), wherein the site of modulated transcription within the target DNA is determined by the guide RNA.

[0216] In some cases, the activity portion of a chimeric site-directed modifying polypeptide has enzymatic activity that modifies target DNA (e.g., nuclease activity, methyltransferase activity, demethylase activity, DNA repair activity, DNA damage activity, deamination activity, dismutase activity, alkylation activity, depurination activity, oxidation activity, pyrimidine dimer forming activity, integrase activity, transposase activity, recombinase activity, polymerase activity, ligase activity, helicase activity, photolyase activity or glycosylase activity).

[0217] In other cases, the activity portion of a chimeric site-directed modifying polypeptide has enzymatic activity (e.g., methyltransferase activity, demethylase activity, acetyltransferase activity, deacetylase activity, kinase activity, phosphatase activity, ubiquitin ligase activity, deubiquitinating activity, adenylation activity, deadenylation activity, SUMOylating activity, deSUMOylating activity, ribosylation activity, deribosylation activity, myristoylation activity or demyristoylation activity) that modifies a polypeptide associated with target DNA (e.g., a histone).

[0218] In some cases, the activity portion of a chimeric site-directed modifying polypeptide exhibits enzymatic activity (described above). In other cases, the activity portion of a chimeric site-directed modifying polypeptide modulates transcription of the target DNA (described above). The activity portion of a chimeric site-directed modifying polypeptide is variable and may comprise any heterologous polypeptide sequence that may be useful in the methods disclosed herein.

[0219] Exemplary Chimeric Site-Directed Modifying Polypeptides

[0220] In some embodiments, the activity portion of the chimeric site-directed modifying polypeptide comprises a modified form of the Cas9 protein, including modified forms of any of the Cas9 orthologs described herein, such as SEQ ID NOs: 1-800). In some instances, the modified form of the Cas9 protein comprises an amino acid change (e.g., deletion, insertion, or substitution) that reduces the naturally-occurring nuclease activity of the Cas9 protein. For example, in some instances, the modified form of the Cas9 protein has less than 50%, less than 40%, less than 30%, less than 20%, less than 10%, less than 5%, or less than 1% of the nuclease activity of the corresponding wild-type Cas9 polypeptide. In some cases, the modified form of the Cas9 polypeptide has no substantial nuclease activity.

[0221] In some embodiments, the modified form of the Cas9 polypeptide is a D10A (aspartate to alanine at amino acid position 10 of SEQ ID NO:8) mutation (or the corresponding mutation of any of the proteins presented in SEQ ID NOs: 1-800) that can cleave the complementary strand of the target DNA but has reduced ability to cleave the non-complementary strand of the target DNA. In some embodiments, the modified form of the SEQ ID NO: 8 Cas9 polypeptide is a H840A (histidine to alanine at amino acid position 840) mutation (or the corresponding mutation of any of the proteins set forth as SEQ ID NOs: 1-800) that can cleave the non-complementary strand of the target DNA but has reduced ability to cleave the complementary strand of the target DNA. In some embodiments, the modified form of the SEQ ID NO: 8 Cas9 polypeptide harbors both the D10A and the H840A mutations (or the corresponding mutations of any of the proteins set forth as SEQ ID NOs: 1-800) such that the polypeptide has a reduced ability to cleave both the complementary and the non-complementary strands of the target DNA. Other residues can be mutated to achieve the above effects (i.e. inactivate one or the other nuclease portions). As non-limiting examples, S. pyogenes Cas9 residues D10, G12, G17, E762, H840, N863, H982, H983, A984, D986, and/or A987 of SEQ ID NO: 8 (or the corresponding mutations of any of the proteins set forth as SEQ ID NOs: 1-800) can be altered (i.e., substituted). Also, mutations other than alanine substitutions are contemplated.

[0222] In some embodiments, a modified Cas9 endonuclease comprises one or more mutations corresponding to S. pyogenes Cas9 mutation E762A, HH983AA or D986A in SEQ ID NO: 8. In some embodiments, the modified Cas 9 endonuclease further comprises one or more mutations corresponding to S. pyogenes Cas9 mutation D10A, H840A, G12A, G17A, N854A, N863A, N982A or A984A in SEQ ID NO: 8. For example, the modified Cas9 endonuclease may comprise a variant at least about 75% identical to any of SEQ ID NOs: 1-800 that comprises one or more mutations corresponding to a mutation E762A, HH983AA or D986A in SEQ ID NO: 8; and/or one or more mutations corresponding to a mutation D10A, H840A, G12A, G17A, N854A, N863A, N982A or A984A in SEQ ID NO: 8. In some embodiments, such a variant comprises a region at least about 75%, at least about 80%, at least about 85%, at least about 90%, at least about 95%, at least about 99% or 100% amino acid sequence identity to the regions corresponding to amino acids 7-166 and/or 731-1003 of SEQ ID NO: 8.

TABLE 1
Table 1 lists four motifs that are present in Cas9 sequences from various species.
The amino acids listed here are from the Cas9 from S. pyogenes (SEQ ID NO: 8).

| Motif | Amino acids (residue #s) | Highly conserved |
|---|---|---|
| RuvC-like I | IGLDIGTNSVGWAVI (7-21) | D10, G12, G17 |
| RuvC-like II | IVIEMARE (759-766) | E762 |
| HNH-motif | DVDHIVPQSFLKDDSIDNKVLTRSDKN (837- 863) | H840, N854, N863 |
| RuvC-like II | HHAHDAYL (982-989) | H982, H983, A984, |
| | | D986, A987 |

[0223] In some cases, the chimeric site-directed modifying polypeptide comprises an amino acid sequence having at least about 75%, at least about 80%, at least about 85%, at least about 90%, at least about 95%, at least about 99% or 100% amino acid sequence identity to amino acids 7-166 and/or 731-1003 of SEQ ID NO: 8, or to the corresponding portions in any of the amino acid sequences set forth as SEQ ID NOs: 1-800. In some cases, the chimeric site-directed modifying polypeptide comprises 4 motifs (as listed in Table 1), each with amino acid sequences having at least about 75%, at least about 80%, at least about 85%, at least about 90%, at least about 95%, at least about 99% or 100% amino acid sequence identity to each of the 4 motifs listed in Table 1, or to the corresponding portions in any of the amino acid sequences set forth as SEQ ID NOs: 1-800. In some cases, the chimeric site-directed modifying polypeptide comprises amino acid sequences having at least about 75%, at least about 80%, at least about 85%, at least about 90%, at least about 95%, at least about 99% or 100% amino acid sequence identity to amino acids 7-166 and/or 731-1003 of SEQ ID NO: 8, or to the corresponding portions in any of the amino acid sequences set forth as SEQ ID NOs: 1-800.

[0224] In some embodiments, the activity portion of the site-directed modifying polypeptide comprises a heterologous polypeptide that has DNA-modifying activity and/or transcription factor activity and/or DNA-associated polypeptide-modifying activity. In some cases, a heterologous polypeptide replaces a portion of the Cas9 polypeptide that provides nuclease activity. In other embodiments, a site-directed modifying polypeptide comprises both a portion of the Cas9 polypeptide that normally provides nuclease activity (and that portion can be fully active or can instead be modified to have less than 100% of the corresponding wild-type activity) and a heterologous polypeptide. In other words, in some cases, a chimeric site-directed modifying polypeptide is a fusion polypeptide comprising both the portion of the Cas9 polypeptide that normally provides nuclease activity and the heterologous polypeptide. In other cases, a chimeric site-directed modifying polypeptide is a fusion polypeptide comprising a modified variant of the activity portion of the Cas9 polypeptide (e.g., amino acid change, deletion, insertion) and a heterologous polypeptide. In yet other cases, a chimeric site-directed modifying polypeptide is a fusion polypeptide comprising a heterologous polypeptide and the RNA-binding portion of a naturally-occurring or a modified site-directed modifying polypeptide.

[0225] For example, in a chimeric Cas9 protein, a naturally-occurring (or modified, e.g., mutation, deletion, insertion) bacterial Cas9 polypeptide may be fused to a heterologous polypeptide sequence (i.e. a polypeptide sequence from a protein other than Cas9 or a polypeptide sequence from another organism). The heterologous polypeptide sequence may exhibit an activity (e.g., enzymatic activity) that will also be exhibited by the chimeric Cas9 protein (e.g., methyltransferase activity, acetyltransferase activity, kinase activity, ubiquitinating activity, etc.). A heterologous nucleic acid sequence may be linked to another nucleic acid sequence (e.g., by genetic engineering) to generate a chimeric nucleotide sequence encoding a chimeric polypeptide. In some embodiments, a chimeric Cas9 polypeptide is generated by fusing a Cas9 polypeptide (e.g., wild type Cas9 or a Cas9 variant, e.g., a Cas9 with reduced or inactivated nuclease activity) with a heterologous sequence that provides for subcellular localization (e.g., a nuclear localization signal (NLS) for targeting to the nucleus; a mitochondrial localization signal for targeting to the mitochondria; a chloroplast localization signal for targeting to a chloroplast; an ER retention signal; and the like). In some embodiments, the heterologous sequence can provide a tag for ease of tracking or purification (e.g., a fluorescent protein, e.g., green fluorescent protein (GFP), YFP, RFP, CFP, mCherry, tdTomato, and the like; a HIS tag, e.g., a 6×His tag; a hemagglutinin (HA) tag; a FLAG tag; a Myc tag; and the like). In some embodiments, the heterologous sequence can provide for increased or decreased stability. In some embodiments, the heterologous sequence can provide a binding domain (e.g., to provide the ability of a chimeric Cas9 polypeptide to bind to another protein of interest, e.g., a DNA or histone modifying protein, a transcription factor or transcription repressor, a recruiting protein, etc.).

[0226] Nucleic Acid Encoding a Chimeric Site-Directed Modifying Polypeptide

[0227] The present disclosure provides a nucleic acid comprising a nucleotide sequence encoding a chimeric site-directed modifying polypeptide. In some embodiments, the nucleic acid comprising a nucleotide sequence encoding a chimeric site-directed modifying polypeptide is an expression vector, e.g., a recombinant expression vector.

[0228] In some embodiments, a method involves contacting a target DNA or introducing into a cell (or a population of cells) one or more nucleic acids comprising a chimeric site-directed modifying polypeptide. Suitable nucleic acids comprising nucleotide sequences encoding a chimeric site-directed modifying polypeptide include expression vectors, where an expression vector comprising a nucleotide sequence encoding a chimeric site-directed modifying polypeptide is a “recombinant expression vector.”

[0229] In some embodiments, the recombinant expression vector is a viral construct, e.g., a recombinant adeno-associated virus construct (see, e.g., U.S. Pat. No. 7,078,387), a recombinant adenoviral construct, a recombinant lentiviral construct, etc.

[0230] Suitable expression vectors include, but are not limited to, viral vectors (e.g. viral vectors based on vaccinia virus; poliovirus; adenovirus (see, e.g., Li et al., Invest Opthalmol Vis Sci 35:2543 2549, 1994; Borras et al., Gene Ther 6:515 524, 1999; Li and Davidson, PNAS 92:7700 7704, 1995; Sakamoto et al., H Gene Ther 5:1088 1097, 1999; WO 94/12649, WO 93/03769; WO 93/19191; WO 94/28938; WO 95/11984 and WO 95/00655); adeno-associated virus (see, e.g., Ali et al., Hum Gene Ther 9:81 86, 1998, Flannery et al., PNAS 94:6916 6921, 1997; Bennett et al., Invest Opthalmol Vis Sci 38:2857 2863, 1997; Jomary et al., Gene Ther 4:683 690, 1997, Rolling et al., Hum Gene Ther 10:641 648, 1999; Ali et al., Hum Mol Genet 5:591 594, 1996; Srivastava in WO 93/09239, Samulski et al., J. Vir. (1989) 63:3822-3828; Mendelson et al., Virol. (1988) 166:154-165; and Flotte et al., PNAS (1993) 90:10613-10617); SV40; herpes simplex virus; human immunodeficiency virus (see, e.g., Miyoshi et al., PNAS 94:10319 23, 1997; Takahashi et al., J Virol 73:7812 7816, 1999); a retroviral vector (e.g., Murine Leukemia Virus, spleen necrosis virus, and vectors derived from retroviruses such as Rous Sarcoma Virus, Harvey Sarcoma Virus, avian leukosis virus, a lentivirus, human immunodeficiency virus, myeloproliferative sarcoma virus, and mammary tumor virus); and the like.

[0231] Numerous suitable expression vectors are known to those of skill in the art, and many are commercially available. The following vectors are provided by way of example; for eukaryotic host cells: pXT1, pSG5 (Stratagene), pSVK3, pBPV, pMSG, and pSVLSV40 (Pharmacia). However, any other vector may be used so long as it is compatible with the host cell.

[0232] Depending on the host/vector system utilized, any of a number of suitable transcription and translation control elements, including constitutive and inducible promoters, transcription enhancer elements, transcription terminators, etc. may be used in the expression vector (see e.g., Bitter et al. (1987) Methods in Enzymology, 153:516-544).

[0233] In some embodiments, a nucleotide sequence encoding a chimeric site-directed modifying polypeptide is operably linked to a control element, e.g., a transcriptional control element, such as a promoter. The transcriptional control element may be functional in either a eukaryotic cell, e.g., a mammalian cell; or a prokaryotic cell (e.g., bacterial or archaeal cell). In some embodiments, a nucleotide sequence encoding a chimeric site-directed modifying polypeptide is operably linked to multiple control elements that allow expression of the nucleotide sequence encoding a chimeric site-directed modifying polypeptide in both prokaryotic and eukaryotic cells.

[0234] Non-limiting examples of suitable eukaryotic promoters (promoters functional in a eukaryotic cell) include those from cytomegalovirus (CMV) immediate early, herpes simplex virus (HSV) thymidine kinase, early and late SV40, long terminal repeats (LTRs) from retrovirus, and mouse metallothionein-I. Selection of the appropriate vector and promoter is well within the level of ordinary skill in the art. The expression vector may also contain a ribosome binding site for translation initiation and a transcription terminator. The expression vector may also include appropriate sequences for amplifying expression. The expression vector may also include nucleotide sequences encoding protein tags (e.g., 6×His tag, hemagglutinin (HA) tag, a fluorescent protein (e.g., a green fluorescent protein; a yellow fluorescent protein, etc.), etc.) that are fused to the chimeric site-directed modifying polypeptide.

[0235] In some embodiments, a nucleotide sequence encoding a chimeric site-directed modifying polypeptide is operably linked to an inducible promoter (e.g., heat shock promoter, Tetracycline-regulated promoter, Steroid-regulated promoter, Metal-regulated promoter, estrogen receptor-regulated promoter, etc.). In some embodiments, a nucleotide sequence encoding a chimeric site-directed modifying polypeptide is operably linked to a spatially restricted and/or temporally restricted promoter (e.g., a tissue specific promoter, a cell type specific promoter, etc.). In some embodiments, a nucleotide sequence encoding a chimeric site-directed modifying polypeptide is operably linked to a constitutive promoter.

[0236] Methods of introducing a nucleic acid into a host cell are known in the art, and any known method can be used to introduce a nucleic acid (e.g., an expression construct) into a stem cell or progenitor cell. Suitable methods include, include e.g., viral or bacteriophage infection, transfection, conjugation, protoplast fusion, lipofection, electroporation, calcium phosphate precipitation, polyethyleneimine (PEI)-mediated transfection, DEAE-dextran mediated transfection, liposome-mediated transfection, particle gun technology, calcium phosphate precipitation, direct micro injection, nanoparticle-mediated nucleic acid delivery (see, e.g., Panyam et., al Adv Drug Deliv Rev. 2012 Sep. 13. pii: 50169-409X(12)00283-9. doi: 10.1016/j.addr.2012.09.023), and the like.

[0237] Methods

[0238] The present disclosure provides methods for modifying a target DNA and/or a target DNA-associated polypeptide. Generally, a method involves contacting a target DNA with a complex (a “targeting complex”), which complex comprises a guide RNA and a site-directed modifying polypeptide.

[0239] As discussed above, a guide RNA and a site-directed modifying polypeptide form a complex. The guide RNA provides target specificity to the complex by comprising a nucleotide sequence that is complementary to a sequence of a target DNA. The site-directed modifying polypeptide of the complex provides the site-specific activity. In some embodiments, a complex modifies a target DNA, leading to, for example, DNA cleavage, DNA methylation, DNA damage, DNA repair, etc. In other embodiments, a complex modifies a target polypeptide associated with target DNA (e.g., a histone, a DNA-binding protein, etc.), leading to, for example, histone methylation, histone acetylation, histone ubiquitination, and the like. The target DNA may be, for example, naked DNA in vitro, chromosomal DNA in cells in vitro, chromosomal DNA in cells in vivo, etc.

[0240] In some cases, the site-directed modifying polypeptide exhibits nuclease activity that cleaves target DNA at a target DNA sequence defined by the region of complementarity between the guide RNA and the target DNA. In some cases, when the site-directed modifying polypeptide is a Cas9 or Cas9 related polypeptide, site-specific cleavage of the target DNA occurs at locations determined by both (i) base-pairing complementarity between the guide RNA and the target DNA; and (ii) a short motif [referred to as the protospacer adjacent motif (PAM)] in the target DNA. In some embodiments (e.g., when Cas9 from S. pyogenes is used), the PAM sequence of the non-complementary strand is 5′-XGG-3′, where X is any DNA nucleotide and X is immediately 3′ of the target sequence of the non-complementary strand of the target DNA. As such, the PAM sequence of the complementary strand is 5′-CCY-3′, where Y is any DNA nucleotide and Y is immediately 5′ of the target sequence of the complementary strand of the target DNA (where the PAM of the non-complementary strand is 5′-GGG-3′ and the PAM of the complementary strand is 5′-CCC-3′). In some such embodiments, X and Y can be complementary and the X-Y base pair can be any basepair (e.g., X=C and Y=G; X=G and Y=C; X=A and Y=T, X=T and Y=A).

[0241] In some cases, different Cas9 proteins (i.e., Cas9 proteins from various species) may be advantageous to use in the various provided methods in order to capitalize on various enzymatic characteristics of the different Cas9 proteins (e.g., for different PAM sequence preferences; for increased or decreased enzymatic activity; for an increased or decreased level of cellular toxicity; to change the balance between NHEJ, homology-directed repair, single strand breaks, double strand breaks, etc.).

[0242] Cas9 proteins from various species (see SEQ ID NOs: 1-800) may require different PAM sequences in the target DNA. Thus, for a particular Cas9 protein of choice, the PAM sequence requirement may be different than the 5′-XGG-3′ sequence described above. The present disclosure, for example, provides a C. jejuni PAM sequence NNNNACA; P. multocida PAM sequences GNNNCNNA or NNNNC; an F. novicida PAM sequence NG; an S. thermophilus** PAM sequence NNAAAAW; an L. innocua PAM sequence NGG; and an S. dysgalactiae PAM sequence NGG.

[0243] Exemplary methods provided that take advantage of characteristics of Cas9 orthologs include the following.

[0244] A method for manipulating DNA in a cell, comprising contacting the DNA with a Cas9 ortholog-guideRNA complex, wherein the complex comprises: (a) a cognate guide RNA for a first Cas9 endonuclease from a cluster in Supplementary Table S2 and (b) a second Cas9 endonuclease from the cluster that is exchangeable with preserved high cleavage efficiency with the first endonuclease and shares at least 80% identity with the first endonuclease over 80% of their length. In some embodiments, the guide is a single-molecule guide RNA. In some embodiments, the guide RNA is a double-molecule guide RNA. In some embodiments, the first Cas9 endonuclease is from S. pyogenes and the second Cas9 endonuclease is from S. mutans. In some embodiments, the first Cas9 endonuclease is from S. theromophilus* and the second Cas9 endonuclease is from S. mutans. In some embodiments, the first Cas9 endonuclease is from N. meningitidis and the second Cas9 endonuclease is from P. multocida.

[0245] A method for manipulating DNA in a cell, comprising contacting the DNA with a Cas9 ortholog-guideRNA complex, wherein the complex comprises: (a) a cognate guide RNA of a first Cas9 endonuclease from a cluster in Supplementary Table S6 and (b) an Cas9 endonuclease from a cluster in Supplementary Table S6 that is exchangeable with lowered cleavage efficiency with the first endonuclease and shares at least 50% amino acid sequence identity with the first endonuclease over 70% of their length. In some embodiments, the guide is a single-molecule guide RNA. In some embodiments, the guide RNA is a double-molecule guide RNA. In some embodiments, the first Cas9 endonuclease is from C. Jejuni and the second Cas9 endonuclease is from P. multocida. In some embodiments, the first Cas9 endonuclease is from N. meningitidis and the second Cas9 endonuclease is from P. multocida.

[0246] A method for manipulating DNA in a cell, comprising contacting the DNA with two or more Cas9-guideRNA complexes, wherein each Cas9-guideRNA complex comprises: (a) a Cas9 endonuclease from a different cluster in Supplementary Table S6 exhibiting less than 50% amino acid sequence identity with the other endonucleases of the method over 70% of their length, and (b) a guide RNA specifically complexed with each Cas9 endonuclease. In some embodiments, the guide is a single-molecule guide RNA. In some embodiments, the guide RNA is a double-molecule guide RNA. In some embodiments, the Cas9 endonucleases are from F. novicida and S. pyogenes. In some embodiments, the Cas9 endonucleases are from N. meningitidis and S. mutans. In some embodiments, the S. thermophilus* and S. thermophilus** Cas9 endonucleases.

[0247] Many Cas9 orthologs from a wide variety of species have been identified herein. All identified Cas9 orthologs have the same domain architecture with a central HNH endonuclease domain and a split RuvC/RNaseH domain. Cas9 proteins share four key motifs with a conserved architecture. Motifs 1, 2, and 4 are RuvC like motifs while motif 3 is an HNH-motif. In some cases, a suitable site-directed modifying polypeptide comprises an amino acid sequence having four motifs, each of motifs 1-4 having at least about 75%, at least about 80%, at least about 85%, at least about 90%, at least about 95%, at least about 99% or 100% amino acid sequence identity to the motifs 1-4 of the Cas9 amino acid sequence depicted in Table 1), or to the corresponding portions in any of the amino acid sequences set forth in SEQ ID NOs: 1-800. In some cases, a suitable site-directed modifying polypeptide comprises an amino acid sequence having at least about 75%, at least about 80%, at least about 85%, at least about 90%, at least about 95%, at least about 99% or 100% amino acid sequence identity to amino acids 7-166 and/or 731-1003 of SEQ ID NO: 8, or to the corresponding portions in any of the amino acid sequences set forth as SEQ ID NOs: 1-800.

[0248] The nuclease activity cleaves target DNA to produce double strand breaks. These breaks are then repaired by the cell in one of two ways: non-homologous end joining, and homology-directed repair. In non-homologous end joining (NHEJ), the double-strand breaks are repaired by direct ligation of the break ends to one another. As such, no new nucleic acid material is inserted into the site, although some nucleic acid material may be lost, resulting in a deletion. In homology-directed repair, a donor polynucleotide with homology to the cleaved target DNA sequence is used as a template for repair of the cleaved target DNA sequence, resulting in the transfer of genetic information from the donor polynucleotide to the target DNA. As such, new nucleic acid material may be inserted/copied into the site. In some cases, a target DNA is contacted with a donor polynucleotide. In some cases, a donor polynucleotide is introduced into a cell. The modifications of the target DNA due to NHEJ and/or homology-directed repair lead to, for example, gene correction, gene replacement, gene tagging, transgene insertion, nucleotide deletion, gene disruption, gene mutation, sequence replacement, etc. Accordingly, cleavage of DNA by a site-directed modifying polypeptide may be used to delete nucleic acid material from a target DNA sequence (e.g., to disrupt a gene that makes cells susceptible to infection (e.g. the CCRS or CXCR4 gene, which makes T cells susceptible to HIV infection), to remove disease-causing trinucleotide repeat sequences in neurons, to create gene knockouts and mutations as disease models in research, etc.) by cleaving the target DNA sequence and allowing the cell to repair the sequence in the absence of an exogenously provided donor polynucleotide. Thus, the methods can be used to knock out a gene (resulting in complete lack of transcription or altered transcription) or to knock in genetic material into a locus of choice in the target DNA.

[0249] Alternatively, if a guide RNA and a site-directed modifying polypeptide are coadministered to cells with a donor polynucleotide sequence that includes at least a segment with homology to the target DNA sequence, the subject methods may be used to add, i.e. insert or replace, nucleic acid material to a target DNA sequence (e.g. to “knock in” a nucleic acid that encodes for a protein, an siRNA, an miRNA, etc.), to add a tag (e.g., 6×His, a fluorescent protein (e.g., a green fluorescent protein; a yellow fluorescent protein, etc.), hemagglutinin (HA), FLAG, etc.), to add a regulatory sequence to a gene (e.g. promoter, polyadenylation signal, internal ribosome entry sequence (IRES), 2A peptide, start codon, stop codon, splice signal, localization signal, etc.), to modify a nucleic acid sequence (e.g., introduce a mutation), and the like. As such, a complex comprising a guide RNA and a site-directed modifying polypeptide is useful in any in vitro or in vivo application in which it is desirable to modify DNA in a site-specific, i.e. “targeted”, way, for example gene knock-out, gene knock-in, gene editing, gene tagging, sequence replacement, etc., as used in, for example, gene therapy, e.g. to treat a disease or as an antiviral, antipathogenic, or anticancer therapeutic, the production of genetically modified organisms in agriculture, the large scale production of proteins by cells for therapeutic, diagnostic, or research purposes, the induction of iPS cells, biological research, the targeting of genes of pathogens for deletion or replacement, etc.

[0250] In some embodiments, the site-directed modifying polypeptide comprises a modified form of the Cas9 protein. In some instances, the modified form of the Cas9 protein comprises an amino acid change (e.g., deletion, insertion, or substitution) that reduces the naturally-occurring nuclease activity of the Cas9 protein. For example, in some instances, the modified form of the Cas9 protein has less than 50%, less than 40%, less than 30%, less than 20%, less than 10%, less than 5%, or less than 1% of the nuclease activity of the corresponding wild-type Cas9 polypeptide. In some cases, the modified form of the Cas9 polypeptide has no substantial nuclease activity. When a site-directed modifying polypeptide is a modified form of the Cas9 polypeptide that has no substantial nuclease activity, it can be referred to as “dCas9.”

[0251] In some embodiments, the modified form of the Cas9 polypeptide is a D10A (aspartate to alanine at amino acid position 10 of SEQ ID NO:8) mutation (or the corresponding mutation of any of the proteins set forth as SEQ ID NOs: 1-800) that can cleave the complementary strand of the target DNA but has reduced ability to cleave the non-complementary strand of the target DNA (thus resulting in a single strand break (SSB) instead of a DSB). In some embodiments, the modified form of the Cas9 polypeptide is a H840A (histidine to alanine at amino acid position 840 of SEQ ID NO:8) mutation (or the corresponding mutation of any of the proteins set forth as SEQ ID NOs: 1-800) that can cleave the non-complementary strand of the target DNA but has reduced ability to cleave the complementary strand of the target DNA (thus resulting in a single strand break (SSB) instead of a DSB). The use of the D10A or H840A variant of SEQ ID NO: 8 Cas9 (or the corresponding mutations in any of the proteins set forth as SEQ ID NOs: 1-800) can alter the expected biological outcome because the non-homologous end joining (NHEJ) is much more likely to occur when DSBs are present as opposed to SSBs. Thus, in some cases where one wishes to reduce the likelihood of DSB (and therefore reduce the likelihood of NHEJ), a D10A or H840A variant of Cas9 can be used. Other residues can be mutated to achieve the same effect (i.e. inactivate one or the other nuclease portions). As non-limiting examples, SEQ ID NO: 8 S. pyogenes Cas9 residues D10, G12, G17, E762, H840, N863, H982, H983, A984, D986, and/or A987 (or the corresponding mutations of any of the proteins set forth as SEQ ID NOs: 1-800) can be altered (i.e., substituted). Also, mutations other than alanine substitutions are contemplated. In some embodiments when a site-directed polypeptide (e.g., site-directed modifying polypeptide) has reduced catalytic activity (e.g., when a SEQ ID NO: 8 Cas9 protein has a D10, G12, G17, E762, H840, N863, H982, H983, A984, D986, and/or a A987 mutation, e.g., D 10A, G12A, G17A, E762A, H840A, N863A, H982A, H983A, A984A, and/or D986A), the polypeptide can still bind to target DNA in a site-specific manner (because it is still guided to a target DNA sequence by a guide RNA) as long as it retains the ability to interact with the guide RNA.

[0252] In some embodiments, the modified form of the SEQ ID NO: 8 Cas9 polypeptide harbors both the D10A and the H840A mutations (or the corresponding mutations of any of the proteins set forth as SEQ ID NOs: 1-800) such that the polypeptide has a reduced ability to cleave both the complementary and the non-complementary strands of the target DNA (i.e., the variant can have no substantial nuclease activity). Other residues can be mutated to achieve the same effect (i.e. inactivate one or the other nuclease portions). As non-limiting examples, SEQ ID NO: 8 residues D10, G12, G17, E762, H840, N863, H982, H983, A984, D986, and/or A987 (or the corresponding mutations of any of the proteins set forth as SEQ ID NOs: 1-800) can be altered (i.e., substituted). Also, mutations other than alanine substitutions are contemplated.

[0253] In some embodiments, the site-directed modifying polypeptide comprises a heterologous sequence (e.g., a fusion). In some embodiments, a heterologous sequence can provide for subcellular localization of the site-directed modifying polypeptide (e.g., a nuclear localization signal (NLS) for targeting to the nucleus; a mitochondrial localization signal for targeting to the mitochondria; a chloroplast localization signal for targeting to a chloroplast; a ER retention signal; and the like). In some embodiments, a heterologous sequence can provide a tag for ease of tracking or purification (e.g., a fluorescent protein, e.g., green fluorescent protein (GFP), YFP, RFP, CFP, mCherry, tdTomato, and the like; a his tag, e.g., a 6×His tag; a hemagglutinin (HA) tag; a FLAG tag; a Myc tag; and the like). In some embodiments, the heterologous sequence can provide for increased or decreased stability.

[0254] In some embodiments, a site-directed modifying polypeptide can be codon-optimized. This type of optimization is known in the art and entails the mutation of foreign-derived DNA to mimic the codon preferences of the intended host organism or cell while encoding the same protein. Thus, the codons are changed, but the encoded protein remains unchanged. For example, if the intended target cell was a human cell, a human codon-optimized Cas9 (or variant, e.g., enzymatically inactive variant) would be a suitable site-directed modifying polypeptide. Any suitable site-directed modifying polypeptide (e.g., any Cas9 such as any of the sequences set forth in SEQ ID NOs: 1-800) can be codon optimized. As another non-limiting example, if the intended host cell were a mouse cell, than a mouse codon-optimized Cas9 (or variant, e.g., enzymatically inactive variant) would be a suitable site-directed modifying polypeptide. While codon optimization is not required, it is acceptable and may be preferable in certain cases.

[0255] Polyadenylation signals can also be chosen to optimize expression in the intended host.

[0256] In some embodiments, a guide RNA and a site-directed modifying polypeptide are used as an inducible system for shutting off gene expression in bacterial cells. In some cases, nucleic acids encoding an appropriate guide RNA and/or an appropriate site-directed polypeptide are incorporated into the chromosome of a target cell and are under control of an inducible promoter. When the guide RNA and/or the site-directed polypeptide are induced, the target DNA is cleaved (or otherwise modified) at the location of interest (e.g., a target gene on a separate plasmid), when both the guide RNA and the site-directed modifying polypeptide are present and form a complex. As such, in some cases, bacterial expression strains are engineered to include nucleic acid sequences encoding an appropriate site-directed modifying polypeptide in the bacterial genome and/or an appropriate guide RNA on a plasmid (e.g., under control of an inducible promoter), allowing experiments in which the expression of any targeted gene (expressed from a separate plasmid introduced into the strain) could be controlled by inducing expression of the guide RNA and the site-directed polypeptide.

[0257] In some cases, the site-directed modifying polypeptide has enzymatic activity that modifies target DNA in ways other than introducing double strand breaks. Enzymatic activity of interest that may be used to modify target DNA (e.g., by fusing a heterologous polypeptide with enzymatic activity to a site-directed modifying polypeptide, thereby generating a chimeric site-directed modifying polypeptide) includes, but is not limited methyltransferase activity, demethylase activity, DNA repair activity, DNA damage activity, deamination activity, dismutase activity, alkylation activity, depurination activity, oxidation activity, pyrimidine dimer forming activity, integrase activity, transposase activity, recombinase activity, polymerase activity, ligase activity, helicase activity, photolyase activity or glycosylase activity). Methylation and demethylation is recognized in the art as an important mode of epigenetic gene regulation while DNA damage and repair activity is essential for cell survival and for proper genome maintenance in response to environmental stresses.

[0258] As such, the methods herein find use in the epigenetic modification of target DNA and may be employed to control epigenetic modification of target DNA at any location in a target DNA by genetically engineering the desired complementary nucleic acid sequence into the DNA-targeting segment of a guide RNA. The methods herein also find use in the intentional and controlled damage of DNA at any desired location within the target DNA. The methods herein also find use in the sequence-specific and controlled repair of DNA at any desired location within the target DNA. Methods to target DNA-modifying enzymatic activities to specific locations in target DNA find use in both research and clinical applications.

[0259] In some cases, the site-directed modifying polypeptide has activity that modulates the transcription of target DNA (e.g., in the case of a chimeric site-directed modifying polypeptide, etc.). In some cases, a chimeric site-directed modifying polypeptides comprising a heterologous polypeptide that exhibits the ability to increase or decrease transcription (e.g., transcriptional activator or transcription repressor polypeptides) is used to increase or decrease the transcription of target DNA at a specific location in a target DNA, which is guided by the DNA-targeting segment of the guide RNA. Examples of source polypeptides for providing a chimeric site-directed modifying polypeptide with transcription modulatory activity include, but are not limited to light-inducible transcription regulators, small molecule/drug-responsive transcription regulators, transcription factors, transcription repressors, etc. In some cases, the method is used to control the expression of a targeted coding-RNA (protein-encoding gene) and/or a targeted non-coding RNA (e.g., tRNA, rRNA, snoRNA, siRNA, miRNA, long ncRNA, etc.). In some cases, the site-directed modifying polypeptide has enzymatic activity that modifies a polypeptide associated with DNA (e.g. histone). In some embodiments, the enzymatic activity is methyltransferase activity, demethylase activity, acetyltransferase activity, deacetylase activity, kinase activity, phosphatase activity, ubiquitin ligase activity (i.e., ubiquitination activity), deubiquitinating activity, adenylation activity, deadenylation activity, SUMOylating activity, deSUMOylating activity, ribosylation activity, deribosylation activity, myristoylation activity, demyristoylation activity glycosylation activity (e.g., from GlcNAc transferase) or deglycosylation activity. The enzymatic activities listed herein catalyze covalent modifications to proteins. Such modifications are known in the art to alter the stability or activity of the target protein (e.g., phosphorylation due to kinase activity can stimulate or silence protein activity depending on the target protein). Of particular interest as protein targets are histones. Histone proteins are known in the art to bind DNA and form complexes known as nucleosomes. Histones can be modified (e.g., by methylation, acetylation, ubuitination, phosphorylation) to elicit structural changes in the surrounding DNA, thus controlling the accessibility of potentially large portions of DNA to interacting factors such as transcription factors, polymerases and the like. A single histone can be modified in many different ways and in many different combinations (e.g., trimethylation of lysine 27 of histone 3, H3K27, is associated with DNA regions of repressed transcription while trimethylation of lysine 4 of histone 3, H3K4, is associated with DNA regions of active transcription). Thus, a site-directed modifying polypeptide with histone-modifying activity finds use in the site specific control of DNA structure and can be used to alter the histone modification pattern in a selected region of target DNA. Such methods find use in both research and clinical applications.

[0260] In some embodiments, multiple guide RNAs are used simultaneously to simultaneously modify different locations on the same target DNA or on different target DNAs. In some embodiments, two or more guide RNAs target the same gene or transcript or locus. In some embodiments, two or more guide RNAs target different unrelated loci. In some embodiments, two or more guide RNAs target different, but related loci.

[0261] In some cases, the site-directed modifying polypeptide is provided directly as a protein. As one non-limiting example, fungi (e.g., yeast) can be transformed with exogenous protein and/or nucleic acid using spheroplast transformation (see Kawai et al., Bioeng Bugs. 2010 November-December; 1(6):395-403: “Transformation of Saccharomyces cerevisiae and other fungi: methods and possible underlying mechanism”; and Tanka et al., Nature. 2004 March 18; 428(6980):323-8: “Conformational variations in an infectious protein determine prion strain differences”; both of which are herein incorporated by reference in their entirety). Thus, a site-directed modifying polypeptide (e.g., Cas9) can be incorporated into a spheroplast (with or without nucleic acid encoding a guide RNA and with or without a donor polynucleotide) and the spheroplast can be used to introduce the content into a yeast cell. A site-directed modifying polypeptide can be introduced into a cell (provided to the cell) by any convenient method; such methods are known to those of ordinary skill in the art. As another non-limiting example, a site-directed modifying polypeptide can be injected directly into a cell (e.g., with or without nucleic acid encoding a guide RNA and with or without a donor polynucleotide), e.g., a cell of a zebrafish embryo, the pronucleus of a fertilized mouse oocyte, etc.

[0262] Target Cells of Interest

[0263] In some of the above applications, the methods may be employed to induce DNA cleavage, DNA modification, and/or transcriptional modulation in mitotic or post-mitotic cells in vivo and/or ex vivo and/or in vitro (e.g., to produce genetically modified cells that can be reintroduced into an individual). Because the guide RNA provide specificity by hybridizing to target DNA, a mitotic and/or post-mitotic cell of interest in the disclosed methods may include a cell from any organism (e.g. a bacterial cell, an archaeal cell, a cell of a single-cell eukaryotic organism, a plant cell, an algal cell, e.g., Botryococcus braunii, Chlamydomonas reinhardtii, Nannochloropsis gaditana, Chlorella pyrenoidosa, Sargassum patens C. Agardh, and the like, a fungal cell (e.g., a yeast cell), an animal cell, a cell from an invertebrate animal (e.g. fruit fly, cnidarian, echinoderm, nematode, etc.), a cell from a vertebrate animal (e.g., fish, amphibian, reptile, bird, mammal), a cell from a mammal, a cell from a rodent, a cell from a primate, a cell from a human, etc.).

[0264] Any type of cell may be of interest (e.g. a stem cell, e.g. an embryonic stem (ES) cell, an induced pluripotent stem (iPS) cell, a germ cell; a somatic cell, e.g. a fibroblast, a hematopoietic cell, a neuron, a muscle cell, a bone cell, a hepatocyte, a pancreatic cell; an in vitro or in vivo embryonic cell of an embryo at any stage, e.g., a 1-cell, 2-cell, 4-cell, 8-cell, etc. stage zebrafish embryo; etc.). Cells may be from established cell lines or they may be primary cells, where “primary cells”, “primary cell lines”, and “primary cultures” are used interchangeably herein to refer to cells and cells cultures that have been derived from a and allowed to grow in vitro for a limited number of passages, i.e. splittings, of the culture. For example, primary cultures are cultures that may have been passaged 0 times, 1 time, 2 times, 4 times, 5 times, 10 times, or 15 times, but not enough times go through the crisis stage. Typically, the primary cell lines of the present invention are maintained for fewer than 10 passages in vitro. Target cells are in many embodiments unicellular organisms, or are grown in culture.

[0265] If the cells are primary cells, they may be harvest from an individual by any convenient method. For example, leukocytes may be conveniently harvested by apheresis, leukocytapheresis, density gradient separation, etc., while cells from tissues such as skin, muscle, bone marrow, spleen, liver, pancreas, lung, intestine, stomach, etc. are most conveniently harvested by biopsy. An appropriate solution may be used for dispersion or suspension of the harvested cells. Such solution will generally be a balanced salt solution, e.g. normal saline, phosphate-buffered saline (PBS), Hank's balanced salt solution, etc., conveniently supplemented with fetal calf serum or other naturally occurring factors, in conjunction with an acceptable buffer at low concentration, generally from 5-25 mM. Convenient buffers include HEPES, phosphate buffers, lactate buffers, etc. The cells may be used immediately, or they may be stored, frozen, for long periods of time, being thawed and capable of being reused. In such cases, the cells will usually be frozen in 10% DMSO, 50% serum, 40% buffered medium, or some other such solution as is commonly used in the art to preserve cells at such freezing temperatures, and thawed in a manner as commonly known in the art for thawing frozen cultured cells.

[0266] Nucleic Acids Encoding a Guide RNA and/or a Site-Directed Modifying Polypeptide

[0267] In some embodiments, a method involves contacting a target DNA or introducing into a cell (or a population of cells) one or more nucleic acids comprising nucleotide sequences encoding a guide RNA and/or a site-directed modifying polypeptide and/or a donor polynucleotide. Suitable nucleic acids comprising nucleotide sequences encoding a guide RNA and/or a site-directed modifying polypeptide include expression vectors, where an expression vector comprising a nucleotide sequence encoding a guide RNA and/or a site-directed modifying polypeptide is a “recombinant expression vector.”

[0268] In some embodiments, the recombinant expression vector is a viral construct, e.g., a recombinant adeno-associated virus construct (see, e.g., U.S. Pat. No. 7,078,387), a recombinant adenoviral construct, a recombinant lentiviral construct, etc.

[0269] Suitable expression vectors include, but are not limited to, viral vectors (e.g. viral vectors based on vaccinia virus; poliovirus; adenovirus (see, e.g., Li et al., Invest Opthalmol Vis Sci 35:2543 2549, 1994; Borras et al, Gene Ther 6:515 524, 1999; Li and Davidson, PNAS 92:7700 7704, 1995; Sakamoto et al., H Gene Ther 5:1088 1097, 1999; WO 94/12649, WO 93/03769; WO 93/19191; WO 94/28938; WO 95/11984 and WO 95/00655); adeno-associated virus (see, e.g., Ali et al., Hum Gene Ther 9:81 86, 1998, Flannery et al., PNAS 94:6916 6921, 1997; Bennett et al., Invest Opthalmol Vis Sci 38:2857 2863, 1997; Jomary et al., Gene Ther 4:683 690, 1997, Rolling et al., Hum Gene Ther 10:641 648, 1999; All et al., Hum Mol Genet 5:591 594, 1996; Srivastava in WO 93/09239, Samulski et al., J. Vir. (1989) 63:3822-3828; Mendelson et al., Virol. (1988) 166:154-165; and Flotte et al., PNAS (1993) 90:10613-10617); SV40; herpes simplex virus; human immunodeficiency virus (see, e.g., Miyoshi et al., PNAS 94:10319 23, 1997; Takahashi et at, J Virol 73:7812 7816, 1999); a retroviral vector (e.g., Murine Leukemia Virus, spleen necrosis virus, and vectors derived from retroviruses such as Rous Sarcoma Virus, Harvey Sarcoma Virus, avian leukosis virus, a lentivirus, human immunodeficiency virus, myeloproliferative sarcoma virus, and mammary tumor virus); and the like.

[0270] Numerous suitable expression vectors are known to those of skill in the art, and many are commercially available. The following vectors are provided by way of example; for eukaryotic host cells: pXT1, pSG5 (Stratagene), pSVK3, pBPV, pMSG, and pSVLSV40 (Pharmacia). However, any other vector may be used so long as it is compatible with the host cell.

[0271] In some embodiments, a nucleotide sequence encoding a guide RNA and/or a site-directed modifying polypeptide is operably linked to a control element, e.g., a transcriptional control element, such as a promoter. The transcriptional control element may be functional in either a eukaryotic cell, e.g., a mammalian cell, or a prokaryotic cell (e.g., bacterial or archaeal cell). In some embodiments, a nucleotide sequence encoding a guide RNA and/or a site-directed modifying polypeptide is operably linked to multiple control elements that allow expression of the nucleotide sequence encoding a guide RNA and/or a site-directed modifying polypeptide in both prokaryotic and eukaryotic cells.

[0272] Depending on the host/vector system utilized, any of a number of suitable transcription and translation control elements, including constitutive and inducible promoters, transcription enhancer elements, transcription terminators, etc. may be used in the expression vector (e.g., U6 promoter, H1 promoter, etc.; see above) (see e.g., Bitter et al. (1987) Methods in Enzymology, 153:516-544).

[0273] In some embodiments, a guide RNA and/or a site-directed modifying polypeptide can be provided as RNA. In such cases, the guide RNA and/or the RNA encoding the site-directed modifying polypeptide can be produced by direct chemical synthesis or may be transcribed in vitro from a DNA encoding the guide RNA. Methods of synthesizing RNA from a DNA template are well known in the art. In some cases, the guide RNA and/or the RNA encoding the site-directed modifying polypeptide will be synthesized in vitro using an RNA polymerase enzyme (e.g., T7 polymerase, T3 polymerase, SP6 polymerase, etc.). Once synthesized, the RNA may directly contact a target DNA or may be introduced into a cell by any of the well-known techniques for introducing nucleic acids into cells (e.g., microinjection, electroporation, transfection, etc).

[0274] Nucleotides encoding a guide RNA (introduced either as DNA or RNA) and/or a site-directed modifying polypeptide (introduced as DNA or RNA) and/or a donor polynucleotide may be provided to the cells using well-developed transfection techniques; see, e.g. Angel and Yanik (2010) PLoS ONE 5(7): e 11756, and the commercially available TransMessenger® reagents from Qiagen, Stemfect™ RNA Transfection Kit from Stemgent, and TransIT®-mRNA Transfection Kit from Mims Bio LLC. See also Beumer et al. (2008) Efficient gene targeting in Drosophila by direct embryo injection with zinc-finger nucleases. PNAS 105(50):19821-19826. Alternatively, nucleic acids encoding a guide RNA and/or a site-directed modifying polypeptide and/or a chimeric site-directed modifying polypeptide and/or a donor polynucleotide may be provided on DNA vectors. Many vectors, e.g. plasmids, cosmids, minicircles, phage, viruses, etc., useful for transferring nucleic acids into target cells are available. The vectors comprising the nucleic acid(s) may be maintained episomally, e.g. as plasmids, minicircle DNAs, viruses such cytomegalovirus, adenovirus, etc., or they may be integrated into the target cell genome, through homologous recombination or random integration, e.g. retrovirus-derived vectors such as MMLV, HIV-1, ALV, etc.

[0275] Vectors may be provided directly to the cells. In other words, the cells are contacted with vectors comprising the nucleic acid encoding guide RNA and/or a site-directed modifying polypeptide and/or a chimeric site-directed modifying polypeptide and/or a donor polynucleotide such that the vectors are taken up by the cells. Methods for contacting cells with nucleic acid vectors that are plasmids, including electroporation, calcium chloride transfection, microinjection, and lipofection are well known in the art. For viral vector delivery, the cells are contacted with viral particles comprising the nucleic acid encoding a guide RNA and/or a site-directed modifying polypeptide and/or a chimeric site-directed modifying polypeptide and/or a donor polynucleotide. Retroviruses, for example, lentiviruses, are particularly suitable to the method of the invention. Commonly used retroviral vectors are “defective”, i.e. unable to produce viral proteins required for productive infection. Rather, replication of the vector requires growth in a packaging cell line. To generate viral particles comprising nucleic acids of interest, the retroviral nucleic acids comprising the nucleic acid are packaged into viral capsids by a packaging cell line. Different packaging cell lines provide a different envelope protein (ecotropic, amphotropic or xenotropic) to be incorporated into the capsid, this envelope protein determining the specificity of the viral particle for the cells (ecotropic for murine and rat; amphotropic for most mammalian cell types including human, dog and mouse; and xenotropic for most mammalian cell types except murine cells). The appropriate packaging cell line may be used to ensure that the cells are targeted by the packaged viral particles. Methods of introducing the retroviral vectors comprising the nucleic acid encoding the reprogramming factors into packaging cell lines and of collecting the viral particles that are generated by the packaging lines are well known in the art. Nucleic acids can also introduced by direct micro-injection (e.g., injection of RNA into a zebrafish embryo).

[0276] Vectors used for providing the nucleic acids encoding guide RNA and/or a site-directed modifying polypeptide and/or a chimeric site-directed modifying polypeptide and/or a donor polynucleotide to the cells will typically comprise suitable promoters for driving the expression, that is, transcriptional activation, of the nucleic acid of interest. In other words, the nucleic acid of interest will be operably linked to a promoter. This may include ubiquitously acting promoters, for example, the CMV-13-actin promoter, or inducible promoters, such as promoters that are active in particular cell populations or that respond to the presence of drugs such as tetracycline. By transcriptional activation, it is intended that transcription will be increased above basal levels in the target cell by at least about 10 fold, by at least about 100 fold, more usually by at least about 1000 fold. In addition, vectors used for providing a guide RNA and/or a site-directed modifying polypeptide and/or a chimeric site-directed modifying polypeptide and/or a donor polynucleotide to the cells may include nucleic acid sequences that encode for selectable markers in the target cells, so as to identify cells that have taken up the guide RNA and/or a site-directed modifying polypeptide and/or a chimeric site-directed modifying polypeptide and/or a donor polynucleotide.

[0277] A guide RNA and/or a site-directed modifying polypeptide and/or a chimeric site-directed modifying polypeptide may instead be used to contact DNA or introduced into cells as RNA. Methods of introducing RNA into cells are known in the art and may include, for example, direct injection, transfection, or any other method used for the introduction of DNA. A site-directed modifying polypeptide may instead be provided to cells as a polypeptide. Such a polypeptide may optionally be fused to a polypeptide domain that increases solubility of the product. The domain may be linked to the polypeptide through a defined protease cleavage site, e.g. a TEV sequence, which is cleaved by TEV protease. The linker may also include one or more flexible sequences, e.g. from 1 to 10 glycine residues. In some embodiments, the cleavage of the fusion protein is performed in a buffer that maintains solubility of the product, e.g. in the presence of from 0.5 to 2 M urea, in the presence of polypeptides and/or polynucleotides that increase solubility, and the like. Domains of interest include endosomolytic domains, e.g. influenza HA domain; and other polypeptides that aid in production, e.g. IF2 domain, GST domain, GRPE domain, and the like. The polypeptide may be formulated for improved stability. For example, the peptides may be PEGylated, where the polyethyleneoxy group provides for enhanced lifetime in the blood stream.

[0278] Additionally or alternatively, the site-directed modifying polypeptide may be fused to a polypeptide permeant domain to promote uptake by the cell. A number of permeant domains are known in the art and may be used in the non-integrating polypeptides of the present invention, including peptides, peptidomimetics, and non-peptide carriers. For example, a permeant peptide may be derived from the third alpha helix of Drosophila melanogaster transcription factor Antennapaedia, referred to as penetratin, which comprises the amino acid sequence RQIKIWFQNRRMKWKK. As another example, the permeant peptide comprises the HIV-1 tat basic region amino acid sequence, which may include, for example, amino acids 49-57 of naturally-occurring tat protein. Other permeant domains include polyarginine motifs, for example, the region of amino acids 34-56 of HIV-1 rev protein, nona-arginine, octa-arginine, and the like. (See, for example, Futaki et al. (2003) Curr Protein Pept Sci. 2003 April; 4(2): 87-9 and 446; and Wender et al. (2000) Proc. Natl. Acad. Sci. U.S.A 2000 Nov. 21; 97(24):13003-8; published U.S. Patent applications 20030220334; 20030083256; 20030032593; and 20030022831, herein specifically incorporated by reference for the teachings of translocation peptides and peptoids). The nona-arginine (R9) sequence is one of the more efficient PTDs that have been characterized (Wender et al. 2000; Uemura et al. 2002). The site at which the fusion is made may be selected in order to optimize the biological activity, secretion or binding characteristics of the polypeptide. The optimal site will be determined by routine experimentation.

[0279] A site-directed modifying polypeptide may be produced in vitro or by eukaryotic cells or by prokaryotic cells, and it may be further processed by unfolding, e.g. heat denaturation, DTT reduction, etc. and may be further refolded, using methods known in the art.

[0280] Modifications of interest that do not alter primary sequence include chemical derivatization of polypeptides, e.g., acylation, acetylation, carboxylation, amidation, etc. Also included are modifications of glycosylation, e.g. those made by modifying the glycosylation patterns of a polypeptide during its synthesis and processing or in further processing steps; e.g. by exposing the polypeptide to enzymes which affect glycosylation, such as mammalian glycosylating or deglycosylating enzymes. Also embraced are sequences that have phosphorylated amino acid residues, e.g. phosphotyrosine, phosphoserine, or phosphothreonine.

[0281] Also included in the invention are guide RNAs and site-directed modifying polypeptides that have been modified using ordinary molecular biological techniques and synthetic chemistry so as to improve their resistance to proteolytic degradation, to change the target sequence specificity, to optimize solubility properties, to alter protein activity (e.g., transcription modulatory activity, enzymatic activity, etc) or to render them more suitable as a therapeutic agent. Analogs of such polypeptides include those containing residues other than naturally occurring L-amino acids, e.g. D-amino acids or non-naturally occurring synthetic amino acids. D-amino acids may be substituted for some or all of the amino acid residues. The site-directed modifying polypeptides may be prepared by in vitro synthesis, using conventional methods as known in the art. Various commercial synthetic apparatuses are available, for example, automated synthesizers by Applied Biosystems, Inc., Beckman, etc. By using synthesizers, naturally occurring amino acids may be substituted with unnatural amino acids. The particular sequence and the manner of preparation will be determined by convenience, economics, purity required, and the like.

[0282] If desired, various groups may be introduced into the peptide during synthesis or during expression, which allow for linking to other molecules or to a surface. Thus cysteines can be used to make thioethers, histidines for linking to a metal ion complex, carboxyl groups for forming amides or esters, amino groups for forming amides, and the like.

[0283] The site-directed modifying polypeptides may also be isolated and purified in accordance with conventional methods of recombinant synthesis. A lysate may be prepared of the expression host and the lysate purified using HPLC, exclusion chromatography, gel electrophoresis, affinity chromatography, or other purification technique. For the most part, the compositions which are used will comprise at least 20% by weight of the desired product, more usually at least about 75% by weight, preferably at least about 95% by weight, and for therapeutic purposes, usually at least about 99.5% by weight, in relation to contaminants related to the method of preparation of the product and its purification. Usually, the percentages will be based upon total protein. To induce DNA cleavage and recombination, or any desired modification to a target DNA, or any desired modification to a polypeptide associated with target DNA, the guide RNA and/or the site-directed modifying polypeptide and/or the donor polynucleotide, whether they be introduced as nucleic acids or polypeptides, are provided to the cells for about 30 minutes to about 24 hours, e.g., 1 hour, 1.5 hours, 2 hours, 2.5 hours, 3 hours, 3.5 hours 4 hours, 5 hours, 6 hours, 7 hours, 8 hours, 12 hours, 16 hours, 18 hours, 20 hours, or any other period from about 30 minutes to about 24 hours, which may be repeated with a frequency of about every day to about every 4 days, e.g., every 1.5 days, every 2 days, every 3 days, or any other frequency from about every day to about every four days. The agent(s) may be provided to the cells one or more times, e.g. one time, twice, three times, or more than three times, and the cells allowed to incubate with the agent(s) for some amount of time following each contacting event e.g. 16-24 hours, after which time the media is replaced with fresh media and the cells are cultured further. In cases in which two or more different targeting complexes are provided to the cell (e.g., two different guide RNAs that are complementary to different sequences within the same or different target DNA), the complexes may be provided simultaneously (e.g. as two polypeptides and/or nucleic acids), or delivered simultaneously. Alternatively, they may be provided consecutively, e.g. the targeting complex being provided first, followed by the second targeting complex, etc. or vice versa.

[0284] Typically, an effective amount of the guide RNA and/or site-directed modifying polypeptide and/or donor polynucleotide is provided to the target DNA or cells to induce target modification. An effective amount of the guide RNA and/or site-directed modifying polypeptide and/or donor polynucleotide is the amount to induce a 2-fold increase or more in the amount of target modification observed between two homologous sequences relative to a negative control, e.g. a cell contacted with an empty vector or irrelevant polypeptide. That is to say, an effective amount or dose of the guide RNA and/or site-directed modifying polypeptide and/or donor polynucleotide will induce a 2-fold increase, a 3-fold increase, a 4-fold increase or more in the amount of target modification observed at a target DNA region, in some instances a 5-fold increase, a 6-fold increase or more, sometimes a 7-fold or 8-fold increase or more in the amount of recombination observed, e.g. an increase of 10-fold, 50-fold, or 100-fold or more, in some instances, an increase of 200-fold, 500-fold, 700-fold, or 1000-fold or more, e.g. a 5000-fold, or 10,000-fold increase in the amount of recombination observed. The amount of target modification may be measured by any convenient method. For example, a silent reporter construct comprising complementary sequence to the targeting segment (targeting sequence) of the guide RNA flanked by repeat sequences that, when recombined, will reconstitute a nucleic acid encoding an active reporter may be cotransfected into the cells, and the amount of reporter protein assessed after contact with the guide RNA and/or site-directed modifying polypeptide and/or donor polynucleotide, e.g. 2 hours, 4 hours, 8 hours, 12 hours, 24 hours, 36 hours, 48 hours, 72 hours or more after contact with the guide RNA and/or site-directed modifying polypeptide and/or donor polynucleotide. As another, more sensitivity assay, for example, the extent of recombination at a genomic DNA region of interest comprising target DNA sequences may be assessed by PCR or Southern hybridization of the region after contact with a guide RNA and/or site-directed modifying polypeptide and/or donor polynucleotide, e.g. 2 hours, 4 hours, 8 hours, 12 hours, 24 hours, 36 hours, 48 hours, 72 hours or more after contact with the guide RNA and/or site-directed modifying polypeptide and/or donor polynucleotide.

[0285] Contacting the cells with a guide RNA and/or site-directed modifying polypeptide and/or donor polynucleotide may occur in any culture media and under any culture conditions that promote the survival of the cells. For example, cells may be suspended in any appropriate nutrient medium that is convenient, such as Iscove's modified DMEM or RPMI 1640, supplemented with fetal calf serum or heat inactivated goat serum (about 5-10%), L-glutamine, a thiol, particularly 2-mercaptoethanol, and antibiotics, e.g. penicillin and streptomycin. The culture may contain growth factors to which the cells are responsive. Growth factors, as defined herein, are molecules capable of promoting survival, growth and/or differentiation of cells, either in culture or in the intact tissue, through specific effects on a transmembrane receptor. Growth factors include polypeptides and non-polypeptide factors. Conditions that promote the survival of cells are typically permissive of nonhomologous end joining and homology-directed repair. In applications in which it is desirable to insert a polynucleotide sequence into a target DNA sequence, a polynucleotide comprising a donor sequence to be inserted is also provided to the cell. By a “donor sequence” or “donor polynucleotide” it is meant a nucleic acid sequence to be inserted at the cleavage site induced by a site-directed modifying polypeptide. The donor polynucleotide will contain sufficient homology to a genomic sequence at the cleavage site, e.g. 70%, 80%, 85%, 90%, 95%, or 100% homology with the nucleotide sequences flanking the cleavage site, e.g. within about 50 bases or less of the cleavage site, e.g. within about 30 bases, within about 15 bases, within about 10 bases, within about 5 bases, or immediately flanking the cleavage site, to support homology-directed repair between it and the genomic sequence to which it bears homology. Approximately 25, 50, 100, or 200 nucleotides, or more than 200 nucleotides, of sequence homology between a donor and a genomic sequence (or any integral value between 10 and 200 nucleotides, or more) will support homology-directed repair. Donor sequences can be of any length, e.g. 10 nucleotides or more, 50 nucleotides or more, 100 nucleotides or more, 250 nucleotides or more, 500 nucleotides or more, 1000 nucleotides or more, 5000 nucleotides or more, etc.

[0286] The donor sequence is typically not identical to the genomic sequence that it replaces. Rather, the donor sequence may contain at least one or more single base changes, insertions, deletions, inversions or rearrangements with respect to the genomic sequence, so long as sufficient homology is present to support homology-directed repair. In some embodiments, the donor sequence comprises a non-homologous sequence flanked by two regions of homology, such that homology-directed repair between the target DNA region and the two flanking sequences results in insertion of the non-homologous sequence at the target region. Donor sequences may also comprise a vector backbone containing sequences that are not homologous to the DNA region of interest and that are not intended for insertion into the DNA region of interest. Generally, the homologous region(s) of a donor sequence will have at least 50% sequence identity to a genomic sequence with which recombination is desired. In certain embodiments, 60%, 70%, 80%, 90%, 95%, 98%, 99%, or 99.9% sequence identity is present. Any value between 1% and 100% sequence identity can be present, depending upon the length of the donor polynucleotide. The donor sequence may comprise certain sequence differences as compared to the genomic sequence, e.g. restriction sites, nucleotide polymorphisms, selectable markers (e.g., drug resistance genes, fluorescent proteins, enzymes etc.), etc., which may be used to assess for successful insertion of the donor sequence at the cleavage site or in some cases may be used for other purposes (e.g., to signify expression at the targeted genomic locus). In some cases, if located in a coding region, such nucleotide sequence differences will not change the amino acid sequence, or will make silent amino acid changes (i.e., changes which do not affect the structure or function of the protein). Alternatively, these sequences differences may include flanking recombination sequences such as FLPs, IoxP sequences, or the like, that can be activated at a later time for removal of the marker sequence.

[0287] The donor sequence may be provided to the cell as single-stranded DNA, single-stranded RNA, double-stranded DNA, or double-stranded RNA. It may be introduced into a cell in linear or circular form. If introduced in linear form, the ends of the donor sequence may be protected (e.g., from exonucleolytic degradation) by methods known to those of skill in the art. For example, one or more dideoxynucleotide residues are added to the 3′ terminus of a linear molecule and/or self-complementary oligonucleotides are ligated to one or both ends. See, for example, Chang et al. (1987) Proc. Natl. Acad Sci USA 84:4959-4963; Nehls et al. (1996) Science 272:886-889. Additional methods for protecting exogenous polynucleotides from degradation include, but are not limited to, addition of terminal amino group(s) and the use of modified internucleotide linkages such as, for example, phosphorothioates, phosphoramidates, and O-methyl ribose or deoxyribose residues. As an alternative to protecting the termini of a linear donor sequence, additional lengths of sequence may be included outside of the regions of homology that can be degraded without impacting recombination. A donor sequence can be introduced into a cell as part of a vector molecule having additional sequences such as, for example, replication origins, promoters and genes encoding antibiotic resistance. Moreover, donor sequences can be introduced as naked nucleic acid, as nucleic acid complexed with an agent such as a liposome or poloxamer, or can be delivered by viruses (e.g., adenovirus, AAV), as described above for nucleic acids encoding a guide RNA and/or site-directed modifying polypeptide and/or donor polynucleotide.

[0288] Following the methods described above, a DNA region of interest may be cleaved and modified, i.e. “genetically modified”, ex vivo. In some embodiments, as when a selectable marker has been inserted into the DNA region of interest, the population of cells may be enriched for those comprising the genetic modification by separating the genetically modified cells from the remaining population. Prior to enriching, the “genetically modified” cells may make up only about 1% or more (e.g., 2% or more, 3% or more, 4% or more, 5% or more, 6% or more, 7% or more, 8% or more, 9% or more, 10% or more, 15% or more, or 20% or more) of the cellular population. Separation of “genetically modified” cells may be achieved by any convenient separation technique appropriate for the selectable marker used. For example, if a fluorescent marker has been inserted, cells may be separated by fluorescence activated cell sorting, whereas if a cell surface marker has been inserted, cells may be separated from the heterogeneous population by affinity separation techniques, e.g. magnetic separation, affinity chromatography, “panning” with an affinity reagent attached to a solid matrix, or other convenient technique. Techniques providing accurate separation include fluorescence activated cell sorters, which can have varying degrees of sophistication, such as multiple color channels, low angle and obtuse light scattering detecting channels, impedance channels, etc. The cells may be selected against dead cells by employing dyes associated with dead cells (e.g. propidium iodide). Any technique may be employed which is not unduly detrimental to the viability of the genetically modified cells. Cell compositions that are highly enriched for cells comprising modified DNA are achieved in this manner. By “highly enriched”, it is meant that the genetically modified cells will be 70% or more, 75% or more, 80% or more, 85% or more, 90% or more of the cell composition, for example, about 95% or more, or 98% or more of the cell composition. In other words, the composition may be a substantially pure composition of genetically modified cells.

[0289] Genetically modified cells produced by the methods described herein may be used immediately. Alternatively, the cells may be frozen at liquid nitrogen temperatures and stored for long periods of time, being thawed and capable of being reused. In such cases, the cells will usually be frozen in 10% dimethylsulfoxide (DMSO), 50% serum, 40% buffered medium, or some other such solution as is commonly used in the art to preserve cells at such freezing temperatures, and thawed in a manner as commonly known in the art for thawing frozen cultured cells.

[0290] The genetically modified cells may be cultured in vitro under various culture conditions. The cells may be expanded in culture, i.e. grown under conditions that promote their proliferation. Culture medium may be liquid or semi-solid, e.g. containing agar, methylcellulose, etc. The cell population may be suspended in an appropriate nutrient medium, such as Iscove's modified DMEM or RPMI 1640, normally supplemented with fetal calf serum (about 5-10%), L-glutamine, a thiol, particularly 2-mercaptoethanol, and antibiotics, e.g. penicillin and streptomycin. The culture may contain growth factors to which the regulatory T cells are responsive. Growth factors, as defined herein, are molecules capable of promoting survival, growth and/or differentiation of cells, either in culture or in the intact tissue, through specific effects on a transmembrane receptor. Growth factors include polypeptides and non-polypeptide factors.

[0291] Cells that have been genetically modified in this way may be transplanted to a subject for purposes such as gene therapy, e.g. to treat a disease or as an antiviral, antipathogenic, or anticancer therapeutic, for the production of genetically modified organisms in agriculture, or for biological research. The subject may be a neonate, a juvenile, or an adult. Of particular interest are mammalian subjects. Mammalian species that may be treated with the present methods include canines and felines; equines; bovines; ovines; etc. and primates, particularly humans. Animal models, particularly small mammals (e.g. mouse, rat, guinea pig, hamster, lagomorpha (e.g., rabbit), etc.) may be used for experimental investigations.

[0292] Cells may be provided to the subject alone or with a suitable substrate or matrix, e.g. to support their growth and/or organization in the tissue to which they are being transplanted. Usually, at least 1×10³ cells will be administered, for example 5×10³ cells, 1×10⁴ cells, 5×10⁴ cells, 1×10⁵ cells, 1×10⁶ cells or more. The cells may be introduced to the subject via any of the following routes: parenteral, subcutaneous, intravenous, intracranial, intraspinal, intraocular, or into spinal fluid. The cells may be introduced by injection, catheter, or the like. Examples of methods for local delivery, that is, delivery to the site of injury, include, e.g. through an Ommaya reservoir, e.g. for intrathecal delivery (see e.g. U.S. Pat. Nos. 5,222,982 and 5,385,582, incorporated herein by reference); by bolus injection, e.g. by a syringe, e.g. into a joint; by continuous infusion, e.g. by cannulation, e.g. with convection (see e.g. US Application No. 20070254842, incorporated herein by reference); or by implanting a device upon which the cells have been reversably affixed (see e.g. US Application Nos. 20080081064 and 20090196903, incorporated herein by reference). Cells may also be introduced into an embryo (e.g., a blastocyst) for the purpose of generating a transgenic animal (e.g., a transgenic mouse).

[0293] The number of administrations of treatment to a subject may vary. Introducing the genetically modified cells into the subject may be a one-time event; but in certain situations, such treatment may elicit improvement for a limited period of time and require an on-going series of repeated treatments. In other situations, multiple administrations of the genetically modified cells may be required before an effect is observed. The exact protocols depend upon the disease or condition, the stage of the disease and parameters of the individual subject being treated.

[0294] In other aspects of the disclosure, the guide RNA and/or site-directed modifying polypeptide and/or donor polynucleotide are employed to modify cellular DNA in vivo, again for purposes such as gene therapy, e.g. to treat a disease or as an antiviral, antipathogenic, or anticancer therapeutic, for the production of genetically modified organisms in agriculture, or for biological research. In these in vivo embodiments, a guide RNA and/or site-directed modifying polypeptide and/or donor polynucleotide are administered directly to the individual. A guide RNA and/or site-directed modifying polypeptide and/or donor polynucleotide may be administered by any of a number of well-known methods in the art for the administration of peptides, small molecules and nucleic acids to a subject. A guide RNA and/or site-directed modifying polypeptide and/or donor polynucleotide can be incorporated into a variety of formulations. More particularly, a guide RNA and/or site-directed modifying polypeptide and/or donor polynucleotide of the present invention can be formulated into pharmaceutical compositions by combination with appropriate pharmaceutically acceptable carriers or diluents.

[0295] Pharmaceutical preparations are compositions that include one or more a guide RNA and/or site-directed modifying polypeptide and/or donor polynucleotide present in a pharmaceutically acceptable vehicle. “Pharmaceutically acceptable vehicles” may be vehicles approved by a regulatory agency of the Federal or a state government or listed in the U.S. Pharmacopeia or other generally recognized pharmacopeia for use in mammals, such as humans. The term “vehicle” refers to a diluent, adjuvant, excipient, or carrier with which a compound of the invention is formulated for administration to a mammal. Such pharmaceutical vehicles can be lipids, e.g. liposomes, e.g. liposome dendrimers; liquids, such as water and oils, including those of petroleum, animal, vegetable or synthetic origin, such as peanut oil, soybean oil, mineral oil, sesame oil and the like, saline; gum acacia, gelatin, starch paste, talc, keratin, colloidal silica, urea, and the like. In addition, auxiliary, stabilizing, thickening, lubricating and coloring agents may be used. Pharmaceutical compositions may be formulated into preparations in solid, semi-solid, liquid or gaseous forms, such as tablets, capsules, powders, granules, ointments, solutions, suppositories, injections, inhalants, gels, microspheres, and aerosols. As such, administration of the a guide RNA and/or site-directed modifying polypeptide and/or donor polynucleotide can be achieved in various ways, including oral, buccal, rectal, parenteral, intraperitoneal, intradermal, transdermal, intratracheal, intraocular, etc., administration. The active agent may be systemic after administration or may be localized by the use of regional administration, intramural administration, or use of an implant that acts to retain the active dose at the site of implantation. The active agent may be formulated for immediate activity or it may be formulated for sustained release.

[0296] For some conditions, particularly central nervous system conditions, it may be necessary to formulate agents to cross the blood-brain barrier (BBB). One strategy for drug delivery through the BBB entails disruption of the BBB, either by osmotic means such as mannitol or leukotrienes, or biochemically by the use of vasoactive substances such as bradykinin. The potential for using BBB opening to target specific agents to brain tumors is also an option. A BBB disrupting agent can be co-administered with the therapeutic compositions of the invention when the compositions are administered by intravascular injection. Other strategies to go through the BBB may entail the use of endogenous transport systems, including Caveolin-1 mediated transcytosis, carrier-mediated transporters such as glucose and amino acid carriers, receptor-mediated transcytosis for insulin or transferrin, and active efflux transporters such as p-glycoprotein. Active transport moieties may also be conjugated to the therapeutic compounds for use in the invention to facilitate transport across the endothelial wall of the blood vessel. Alternatively, drug delivery of therapeutics agents behind the BBB may be by local delivery, for example by intrathecal delivery, e.g. through an Ommaya reservoir (see e.g. U.S. Pat. Nos. 5,222,982 and 5,385,582, incorporated herein by reference); by bolus injection, e.g. by a syringe, e.g. intravitreally or intracranially; by continuous infusion, e.g. by cannulation, e.g. with convection (see e.g. US Application No. 20070254842, incorporated here by reference); or by implanting a device upon which the agent has been reversably affixed (see e.g. US Application Nos. 20080081064 and 20090196903, incorporated herein by reference).

[0297] Typically, an effective amount of a guide RNA and/or site-directed modifying polypeptide and/or donor polynucleotide are provided. As discussed above with regard to ex vivo methods, an effective amount or effective dose of a guide RNA and/or site-directed modifying polypeptide and/or donor polynucleotide in vivo is the amount to induce a 2 fold increase or more in the amount of recombination observed between two homologous sequences relative to a negative control, e.g. a cell contacted with an empty vector or irrelevant polypeptide. The amount of recombination may be measured by any convenient method, e.g. as described above and known in the art. The calculation of the effective amount or effective dose of a guide RNA and/or site-directed modifying polypeptide and/or donor polynucleotide to be administered is within the skill of one of ordinary skill in the art, and will be routine to those persons skilled in the art. The final amount to be administered will be dependent upon the route of administration and upon the nature of the disorder or condition that is to be treated.

[0298] The effective amount given to a particular patient will depend on a variety of factors, several of which will differ from patient to patient. A competent clinician will be able to determine an effective amount of a therapeutic agent to administer to a patient to halt or reverse the progression the disease condition as required. Utilizing LD50 animal data, and other information available for the agent, a clinician can determine the maximum safe dose for an individual, depending on the route of administration. For instance, an intravenously administered dose may be more than an intrathecally administered dose, given the greater body of fluid into which the therapeutic composition is being administered. Similarly, compositions which are rapidly cleared from the body may be administered at higher doses, or in repeated doses, in order to maintain a therapeutic concentration. Utilizing ordinary skill, the competent clinician will be able to optimize the dosage of a particular therapeutic in the course of routine clinical trials.

[0299] For inclusion in a medicament, a guide RNA and/or site-directed modifying polypeptide and/or donor polynucleotide may be obtained from a suitable commercial source. As a general proposition, the total pharmaceutically effective amount of the a guide RNA and/or site-directed modifying polypeptide and/or donor polynucleotide administered parenterally per dose will be in a range that can be measured by a dose response curve.

[0300] Therapies based on a guide RNA and/or site-directed modifying polypeptide and/or donor polynucleotides, i.e. preparations of a guide RNA and/or site-directed modifying polypeptide and/or donor polynucleotide to be used for therapeutic administration, must be sterile. Sterility is readily accomplished by filtration through sterile filtration membranes (e.g., 0.2 μm membranes). Therapeutic compositions generally are placed into a container having a sterile access port, for example, an intravenous solution bag or vial having a stopper pierceable by a hypodermic injection needle. The therapies based on a guide RNA and/or site-directed modifying polypeptide and/or donor polynucleotide may be stored in unit or multi-dose containers, for example, sealed ampules or vials, as an aqueous solution or as a lyophilized formulation for reconstitution. As an example of a lyophilized formulation, 10-ml vials are filled with 5 ml of sterile-filtered 1% (w/v) aqueous solution of compound, and the resulting mixture is lyophilized. The infusion solution is prepared by reconstituting the lyophilized compound using bacteriostatic Water-for-Injection.

[0301] Pharmaceutical compositions can include, depending on the formulation desired, pharmaceutically-acceptable, non-toxic carriers of diluents, which are defined as vehicles commonly used to formulate pharmaceutical compositions for animal or human administration. The diluent is selected so as not to affect the biological activity of the combination. Examples of such diluents are distilled water, buffered water, physiological saline, PBS, Ringer's solution, dextrose solution, and Hank's solution. In addition, the pharmaceutical composition or formulation can include other carriers, adjuvants, or non-toxic, nontherapeutic, nonimmunogenic stabilizers, excipients and the like. The compositions can also include additional substances to approximate physiological conditions, such as pH adjusting and buffering agents, toxicity adjusting agents, wetting agents and detergents.

[0302] The composition can also include any of a variety of stabilizing agents, such as an antioxidant for example. When the pharmaceutical composition includes a polypeptide, the polypeptide can be complexed with various well-known compounds that enhance the in vivo stability of the polypeptide, or otherwise enhance its pharmacological properties (e.g., increase the half-life of the polypeptide, reduce its toxicity, enhance solubility or uptake). Examples of such modifications or complexing agents include sulfate, gluconate, citrate and phosphate. The nucleic acids or polypeptides of a composition can also be complexed with molecules that enhance their in vivo attributes. Such molecules include, for example, carbohydrates, polyamines, amino acids, other peptides, ions (e.g., sodium, potassium, calcium, magnesium, manganese), and lipids.

[0303] Further guidance regarding formulations that are suitable for various types of administration can be found in Remington's Pharmaceutical Sciences, Mace Publishing Company, Philadelphia, Pa., 17th ed. (1985). For a brief review of methods for drug delivery, see, Langer, Science 249:1527-1533 (1990).

[0304] The pharmaceutical compositions can be administered for prophylactic and/or therapeutic treatments. Toxicity and therapeutic efficacy of the active ingredient can be determined according to standard pharmaceutical procedures in cell cultures and/or experimental animals, including, for example, determining the LD50 (the dose lethal to 50% of the population) and the ED50 (the dose therapeutically effective in 50% of the population). The dose ratio between toxic and therapeutic effects is the therapeutic index and it can be expressed as the ratio LD50/ED50. Therapies that exhibit large therapeutic indices are preferred.

[0305] The data obtained from cell culture and/or animal studies can be used in formulating a range of dosages for humans. The dosage of the active ingredient typically lines within a range of circulating concentrations that include the ED50 with low toxicity. The dosage can vary within this range depending upon the dosage form employed and the route of administration utilized. The components used to formulate the pharmaceutical compositions are preferably of high purity and are substantially free of potentially harmful contaminants (e.g., at least National Food (NF) grade, generally at least analytical grade, and more typically at least pharmaceutical grade). Moreover, compositions intended for in vivo use are usually sterile. To the extent that a given compound must be synthesized prior to use, the resulting product is typically substantially free of any potentially toxic agents, particularly any endotoxins, which may be present during the synthesis or purification process. Compositions for parental administration are also sterile, substantially isotonic and made under GMP conditions.

[0306] The effective amount of a therapeutic composition to be given to a particular patient will depend on a variety of factors, several of which will differ from patient to patient. A competent clinician will be able to determine an effective amount of a therapeutic agent to administer to a patient to halt or reverse the progression the disease condition as required. Utilizing LD50 animal data, and other information available for the agent, a clinician can determine the maximum safe dose for an individual, depending on the route of administration. For instance, an intravenously administered dose may be more than an intrathecally administered dose, given the greater body of fluid into which the therapeutic composition is being administered. Similarly, compositions which are rapidly cleared from the body may be administered at higher doses, or in repeated doses, in order to maintain a therapeutic concentration. Utilizing ordinary skill, the competent clinician will be able to optimize the dosage of a particular therapeutic in the course of routine clinical trials.

[0307] Genetically Modified Host Cells

[0308] The present disclosure provides genetically modified host cells, including isolated genetically modified host cells, where a genetically modified host cell comprises (has been genetically modified with: 1) an exogenous guide RNA; 2) an exogenous nucleic acid comprising a nucleotide sequence encoding a guide RNA; 3) an exogenous site-directed modifying polypeptide (e.g., a naturally occurring Cas9; a modified, i.e., mutated or variant, Cas9; a chimeric Cas9; etc.); 4) an exogenous nucleic acid comprising a nucleotide sequence encoding a site-directed modifying polypeptide; or 5) any combination of the above. A genetically modified cell is generated by genetically modifying a host cell with, for example: 1) an exogenous guide RNA; 2) an exogenous nucleic acid comprising a nucleotide sequence encoding a guide RNA; 3) an exogenous site-directed modifying polypeptide; 4) an exogenous nucleic acid comprising a nucleotide sequence encoding a site-directed modifying polypeptide; or 5) any combination of the above.).

[0309] All cells suitable to be a target cell are also suitable to be a genetically modified host cell. For example, a genetically modified host cells of interest can be a cell from any organism (e.g. a bacterial cell, an archaeal cell, a cell of a single-cell eukaryotic organism, a plant cell, an algal cell, e.g., Botryococcus braunii, Chlamydomonas reinhardtii, Nannochloropsis gaditana, Chlorella pyrenoidosa, Sargassum patens C. Agardh, and the like, a fungal cell (e.g., a yeast cell), an animal cell, a cell from an invertebrate animal (e.g. fruit fly, cnidarian, echinoderm, nematode, etc.), a cell from a vertebrate animal (e.g., fish, amphibian, reptile, bird, mammal), a cell from a mammal (e.g., a pig, a cow, a goat, a sheep, a rodent, a rat, a mouse, a non-human primate, a human, etc.), etc.

[0310] In some embodiments, a genetically modified host cell has been genetically modified with an exogenous nucleic acid comprising a nucleotide sequence encoding a site-directed modifying polypeptide (e.g., a naturally occurring Cas9; a modified, i.e., mutated or variant, Cas9; a chimeric Cas9; etc.). The DNA of a genetically modified host cell can be targeted for modification by introducing into the cell a guide RNA (or a DNA encoding a guide RNA, which determines the genomic location/sequence to be modified) and optionally a donor nucleic acid. In some embodiments, the nucleotide sequence encoding a site-directed modifying polypeptide is operably linked to an inducible promoter (e.g., heat shock promoter, Tetracycline-regulated promoter, Steroid-regulated promoter, Metal-regulated promoter, estrogen receptor-regulated promoter, etc.). In some embodiments, the nucleotide sequence encoding a site-directed modifying polypeptide is operably linked to a spatially restricted and/or temporally restricted promoter (e.g., a tissue specific promoter, a cell type specific promoter, etc.). In some embodiments, the nucleotide sequence encoding a site-directed modifying polypeptide is operably linked to a constitutive promoter.

[0311] In some embodiments, a genetically modified host cell is in vitro. In some embodiments, a genetically modified host cell is in vivo. In some embodiments, a genetically modified host cell is a prokaryotic cell or is derived from a prokaryotic cell. In some embodiments, a genetically modified host cell is a bacterial cell or is derived from a bacterial cell. In some embodiments, a genetically modified host cell is an archaeal cell or is derived from an archaeal cell. In some embodiments, a genetically modified host cell is a eukaryotic cell or is derived from a eukaryotic cell. In some embodiments, a genetically modified host cell is a plant cell or is derived from a plant cell. In some embodiments, a genetically modified host cell is an animal cell or is derived from an animal cell. In some embodiments, a genetically modified host cell is an invertebrate cell or is derived from an invertebrate cell. In some embodiments, a genetically modified host cell is a vertebrate cell or is derived from a vertebrate cell. In some embodiments, a genetically modified host cell is a mammalian cell or is derived from a mammalian cell. In some embodiments, a genetically modified host cell is a rodent cell or is derived from a rodent cell. In some embodiments, a genetically modified host cell is a human cell or is derived from a human cell.

[0312] The present disclosure further provides progeny of a genetically modified cell, where the progeny can comprise the same exogenous nucleic acid or polypeptide as the genetically modified cell from which it was derived. The present disclosure further provides a composition comprising a genetically modified host cell.

[0313] Genetically Modified Stem Cells and Genetically Modified Progenitor Cells

[0314] In some embodiments, a genetically modified host cell is a genetically modified stem cell or progenitor cell. Suitable host cells include, e.g., stem cells (adult stem cells, embryonic stem cells, iPS cells, etc.) and progenitor cells (e.g., cardiac progenitor cells, neural progenitor cells, etc.). Suitable host cells include mammalian stem cells and progenitor cells, including, e.g., rodent stem cells, rodent progenitor cells, human stem cells, human progenitor cells, etc. Suitable host cells include in vitro host cells, e.g., isolated host cells.

[0315] In some embodiments, a genetically modified host cell comprises an exogenous guide RNA nucleic acid. In some embodiments, a genetically modified host cell comprises an exogenous nucleic acid comprising a nucleotide sequence encoding a guide RNA. In some embodiments, a genetically modified host cell comprises an exogenous site-directed modifying polypeptide (e.g., a naturally occurring Cas9; a modified, i.e., mutated or variant, Cas9; a chimeric Cas9; etc.). In some embodiments, a genetically modified host cell comprises an exogenous nucleic acid comprising a nucleotide sequence encoding a site-directed modifying polypeptide. In some embodiments, a genetically modified host cell comprises exogenous nucleic acid comprising a nucleotide sequence encoding 1) a guide RNA and 2) a site-directed modifying polypeptide.

[0316] In some cases, the site-directed modifying polypeptide comprises an amino acid sequence having at least about 75%, at least about 80%, at least about 85%, at least about 90%, at least about 95%, at least about 99%, or 100%, amino acid sequence identity to amino acids 7-166 and/or 731-1003 of SEQ ID NO: 8, or to the corresponding portions in any of the amino acid sequences set forth as SEQ ID NOs: 1-800.

[0317] Compositions

[0318] The present disclosure provides a composition comprising a guide RNA and/or a site-directed modifying polypeptide. In some cases, the site-directed modifying polypeptide is a chimeric polypeptide. A composition is useful for carrying out a method of the present disclosure, e.g., a method for site-specific modification of a target DNA; a method for site-specific modification of a polypeptide associated with a target DNA; etc.

[0319] Compositions Comprising a Guide RNA

[0320] The present disclosure provides a composition comprising a guide RNA. The composition can comprise, in addition to the guide RNA, one or more of: a salt, e.g., NaCl, MgCl₂, KCl, MgSO₄, etc.; a buffering agent, e.g., a Tris buffer, N-(2-Hydroxyethyl)piperazine-N′-(2-ethanesulfonic acid) (HEPES), 2-(N-Morpholino)ethanesulfonic acid (MES), MES sodium salt, 3-(N-Morpholino)propanesulfonic acid (MOPS), N-tris[Hydroxymethyl]methyl-3-aminopropanesulfonic acid (TAPS), etc.; a solubilizing agent; a detergent, e.g., a non-ionic detergent such as Tween-20, etc.; a nuclease inhibitor; and the like. For example, in some cases, a composition comprises a guide RNA and a buffer for stabilizing nucleic acids.

[0321] In some embodiments, a guide RNA present in a composition is pure, e.g., at least about 75%, at least about 80%, at least about 85%, at least about 90%, at least about 95%, at least about 98%, at least about 99%, or more than 99% pure, where “% purity” means that guide RNA is the recited percent free from other macromolecules, or contaminants that may be present during the production of the guide RNA.

[0322] Compositions Comprising a Chimeric Polypeptide

[0323] The present disclosure provides a composition a chimeric polypeptide. The composition can comprise, in addition to the guide RNA, one or more of: a salt, e.g., NaCl, MgCl₂, KCl, MgSO₄, etc.; a buffering agent, e.g., a Tris buffer, HEPES, MES, MES sodium salt, MOPS, TAPS, etc.; a solubilizing agent; a detergent, e.g., a non-ionic detergent such as Tween-20, etc.; a protease inhibitor; a reducing agent (e.g., dithiothreitol); and the like.

[0324] In some embodiments, a chimeric polypeptide present in a composition is pure, e.g., at least about 75%, at least about 80%, at least about 85%, at least about 90%, at least about 95%, at least about 98%, at least about 99%, or more than 99% pure, where “% purity” means that the site-directed modifying polypeptide is the recited percent free from other proteins, other macromolecules, or contaminants that may be present during the production of the chimeric polypeptide.

[0325] Compositions Comprising a Guide RNA and a Site-Directed Modifying Polypeptide

[0326] The present disclosure provides a composition comprising: (i) a guide RNA or a DNA polynucleotide encoding the same; and ii) a site-directed modifying polypeptide, or a polynucleotide encoding the same. In some cases, the site-directed modifying polypeptide is a chimeric site-directed modifying polypeptide. In other cases, the site-directed modifying polypeptide is a naturally-occurring site-directed modifying polypeptide. In some instances, the site-directed modifying polypeptide exhibits enzymatic activity that modifies a target DNA. In other cases, the site-directed modifying polypeptide exhibits enzymatic activity that modifies a polypeptide that is associated with a target DNA. In still other cases, the site-directed modifying polypeptide modulates transcription of the target DNA.

[0327] The present disclosure provides a composition comprising: (i) a guide RNA, as described above, or a DNA polynucleotide encoding the same, the guide RNA comprising: (a) a first segment comprising a nucleotide sequence that is complementary to a sequence in a target DNA; and (b) a second segment that interacts with a site-directed modifying polypeptide; and (ii) the site-directed modifying polypeptide, or a polynucleotide encoding the same, the site-directed modifying polypeptide comprising: (a) an RNA-binding portion that interacts with the guide RNA; and (b) an activity portion that exhibits site-directed enzymatic activity, wherein the site of enzymatic activity is determined by the guide RNA.

[0328] In some instances, a composition comprises: a composition comprising: (i) a guide RNA, the guide RNA comprising: (a) a first segment comprising a nucleotide sequence that is complementary to a sequence in a target DNA; and (b) a second segment that interacts with a site-directed modifying polypeptide; and (ii) the site-directed modifying polypeptide, the site-directed modifying polypeptide comprising: (a) an RNA-binding portion that interacts with the guide RNA; and (b) an activity portion that exhibits site-directed enzymatic activity, wherein the site of enzymatic activity is determined by the guide RNA.

[0329] In other embodiments, a composition comprises: (i) a polynucleotide encoding a guide RNA, the guide RNA comprising: (a) a first segment comprising a nucleotide sequence that is complementary to a sequence in a target DNA; and (b) a second segment that interacts with a site-directed modifying polypeptide; and (ii) a polynucleotide encoding the site-directed modifying polypeptide, the site-directed modifying polypeptide comprising: (a) an RNA-binding portion that interacts with the guide RNA; and (b) an activity portion that exhibits site-directed enzymatic activity, wherein the site of enzymatic activity is determined by the guide RNA.

[0330] In some embodiments, a composition includes both RNA molecules of a double-molecule guide RNA. As such, in some embodiments, a composition includes an activator-RNA that comprises a duplex-forming segment that is complementary to the duplex-forming segment of a targeter-. The duplex-forming segments of the activator-RNA and the targeter-RNA hybridize to form the dsRNA duplex of the protein-binding segment of the guide RNA. The targeter-RNA further provides the DNA-targeting segment (single stranded) of the guide RNA and therefore targets the guide RNA to a specific sequence within the target DNA. As one non-limiting example, the duplex-forming segment of the activator-RNA comprises a nucleotide sequence that has at least about 70%, at least about 80%, at least about 90%, at least about 95%, at least about 98%, or 100% identity with a tracrRNA sequence set out in Supplementary Table S5. As another non-limiting example, the duplex-forming segment of the targeter-RNA comprises a nucleotide sequence that has at least about 70%, at least about 80%, at least about 90%, at least about 95%, at least about 98%, or 100% identity with a CRISPR repeat sequence set out in Supplementary Table S5.

[0331] The present disclosure provides a composition comprising: (i) a guide RNA, or a DNA polynucleotide encoding the same, the guide RNA comprising: (a) a first segment comprising a nucleotide sequence that is complementary to a sequence in a target DNA; and (b) a second segment that interacts with a site-directed modifying polypeptide; and (ii) the site-directed modifying polypeptide, or a polynucleotide encoding the same, the site-directed modifying polypeptide comprising: (a) an RNA-binding portion that interacts with the guide RNA; and (b) an activity portion that modulates transcription within the target DNA, wherein the site of modulated transcription within the target DNA is determined by the guide RNA.

[0332] For example, in some cases, a composition comprises: (i) a guide RNA, the guide RNA comprising: (a) a first segment comprising a nucleotide sequence that is complementary to a sequence in a target DNA; and (b) a second segment that interacts with a site-directed modifying polypeptide; and (ii) the site-directed modifying polypeptide, the site-directed modifying polypeptide comprising: (a) an RNA-binding portion that interacts with the guide RNA; and (b) an activity portion that modulates transcription within the target DNA, wherein the site of modulated transcription within the target DNA is determined by the guide RNA.

[0333] As another example, in some cases, a composition comprises: (i) a DNA polynucleotide encoding a guide RNA, the guide RNA comprising: (a) a first segment comprising a nucleotide sequence that is complementary to a sequence in a target DNA; and (b) a second segment that interacts with a site-directed modifying polypeptide; and (ii) a polynucleotide encoding the site-directed modifying polypeptide, the site-directed modifying polypeptide comprising: (a) an RNA-binding portion that interacts with the guide RNA; and (b) an activity portion that modulates transcription within the target DNA, wherein the site of modulated transcription within the target DNA is determined by the guide RNA. A composition can comprise, in addition to i) a guide RNA, or a DNA polynucleotide encoding the same; and ii) a site-directed modifying polypeptide, or a polynucleotide encoding the same, one or more of: a salt, e.g., NaCl, MgCl₂, KCl, MgSO₄, etc.; a buffering agent, e.g., a Tris buffer, HEPES, MES, MES sodium salt, MOPS, TAPS, etc.; a solubilizing agent; a detergent, e.g., a non-ionic detergent such as Tween-20, etc.; a protease inhibitor; a reducing agent (e.g., dithiothreitol); and the like.

[0334] In some cases, the components of the composition are individually pure, e.g., each of the components is at least about 75%, at least about 80%, at least about 90%, at least about 95%, at least about 98%, at least about 99%, or at least 99%, pure. In some cases, the individual components of a composition are pure before being added to the composition.

[0335] For example, in some embodiments, a site-directed modifying polypeptide present in a composition is pure, e.g., at least about 75%, at least about 80%, at least about 85%, at least about 90%, at least about 95%, at least about 98%, at least about 99%, or more than 99% pure, where “A, purity” means that the site-directed modifying polypeptide is the recited percent free from other proteins (e.g., proteins other than the site-directed modifying polypeptide), other macromolecules, or contaminants that may be present during the production of the site-directed modifying polypeptide.

[0336] Kits

[0337] The present disclosure provides kits for carrying out a method. A kit can include one or more of: a site-directed modifying polypeptide; a nucleic acid comprising a nucleotide encoding a site-directed modifying polypeptide; a guide RNA; a nucleic acid comprising a nucleotide sequence encoding a guide RNA; an activator-RNA; a nucleic acid comprising a nucleotide sequence encoding an activator-RNA; a targeter-RNA; and a nucleic acid comprising a nucleotide sequence encoding a targeter-RNA. A site-directed modifying polypeptide; a nucleic acid comprising a nucleotide encoding a site-directed modifying polypeptide; a guide RNA; a nucleic acid comprising a nucleotide sequence encoding a guide RNA; an activator-RNA; a nucleic acid comprising a nucleotide sequence encoding an activator-RNA; a targeter-RNA; and a nucleic acid comprising a nucleotide sequence encoding a targeter-RNA, are described in detail above. A kit may comprise a complex that comprises two or more of: a site-directed modifying polypeptide; a nucleic acid comprising a nucleotide encoding a site-directed modifying polypeptide; a guide RNA; a nucleic acid comprising a nucleotide sequence encoding a guide RNA; an activator-RNA; a nucleic acid comprising a nucleotide sequence encoding an activator-RNA; a targeter-RNA; and a nucleic acid comprising a nucleotide sequence encoding a targeter-RNA. In some embodiments, a kit comprises a site-directed modifying polypeptide, or a polynucleotide encoding the same. In some embodiments, the site-directed modifying polypeptide comprises: (a) an RNA-binding portion that interacts with the guide RNA; and (b) an activity portion that modulates transcription within the target DNA, wherein the site of modulated transcription within the target DNA is determined by the guide RNA. In some cases, the activity portion of the site-directed modifying polypeptide exhibits reduced or inactivated nuclease activity. In some cases, the site-directed modifying polypeptide is a chimeric site-directed modifying polypeptide.

[0338] In some embodiments, a kit comprises: a site-directed modifying polypeptide, or a polynucleotide encoding the same, and a reagent for reconstituting and/or diluting the site-directed modifying polypeptide. In other embodiments, a kit comprises a nucleic acid (e.g., DNA, RNA) comprising a nucleotide encoding a site-directed modifying polypeptide. In some embodiments, a kit comprises: a nucleic acid (e.g., DNA, RNA) comprising a nucleotide encoding a site-directed modifying polypeptide; and a reagent for reconstituting and/or diluting the site-directed modifying polypeptide.

[0339] A kit comprising a site-directed modifying polypeptide, or a polynucleotide encoding the same, can further include one or more additional reagents, where such additional reagents can be selected from: a buffer for introducing the site-directed modifying polypeptide into a cell; a wash buffer; a control reagent; a control expression vector or RNA polynucleotide; a reagent for in vitro production of the site-directed modifying polypeptide from DNA, and the like. In some cases, the site-directed modifying polypeptide included in a kit is a chimeric site-directed modifying polypeptide, as described above.

[0340] In some embodiments, a kit comprises a guide RNA, or a DNA polynucleotide encoding the same, the guide RNA comprising: (a) a first segment comprising a nucleotide sequence that is complementary to a sequence in a target DNA; and (b) a second segment that interacts with a site-directed modifying polypeptide. In some embodiments, the guide RNA further comprises a third segment (as described above). In some embodiments, a kit comprises: (i) a guide RNA, or a DNA polynucleotide encoding the same, the guide RNA comprising: (a) a first segment comprising a nucleotide sequence that is complementary to a sequence in a target DNA; and (b) a second segment that interacts with a site-directed modifying polypeptide; and (ii) a site-directed modifying polypeptide, or a polynucleotide encoding the same, the site-directed modifying polypeptide comprising: (a) an RNA-binding portion that interacts with the guide RNA; and (b) an activity portion that exhibits site-directed enzymatic activity, wherein the site of enzymatic activity is determined by the guide RNA. In some embodiments, the activity portion of the site-directed modifying polypeptide does not exhibit enzymatic activity (comprises an inactivated nuclease, e.g., via mutation). In some cases, the kit comprises a guide RNA and a site-directed modifying polypeptide. In other cases, the kit comprises: (i) a nucleic acid comprising a nucleotide sequence encoding a guide RNA; and (ii) a nucleic acid comprising a nucleotide sequence encoding site-directed modifying polypeptide. As another example, a kit can include: (i) a guide RNA, or a DNA polynucleotide encoding the same, comprising: (a) a first segment comprising a nucleotide sequence that is complementary to a sequence in a target DNA; and (b) a second segment that interacts with a site-directed modifying polypeptide; and (ii) the site-directed modifying polypeptide, or a polynucleotide encoding the same, comprising: (a) an RNA-binding portion that interacts with the guide RNA; and (b) an activity portion that that modulates transcription within the target DNA, wherein the site of modulated transcription within the target DNA is determined by the guide RNA In some cases, the kit comprises: (i) a guide RNA; and a site-directed modifying polypeptide. In other cases, the kit comprises: (i) a nucleic acid comprising a nucleotide sequence encoding a guide RNA; and (ii) a nucleic acid comprising a nucleotide sequence encoding site-directed modifying polypeptide. The present disclosure provides a kit comprising: (1) a recombinant expression vector comprising (i) a nucleotide sequence encoding a guide RNA, wherein the guide RNA comprises: (a) a first segment comprising a nucleotide sequence that is complementary to a sequence in a target DNA; and (b) a second segment that interacts with a site-directed modifying polypeptide; and (ii) a nucleotide sequence encoding the site-directed modifying polypeptide, wherein the site-directed modifying polypeptide comprises: (a) an RNA-binding portion that interacts with the guide RNA; and (b) an activity portion that exhibits site-directed enzymatic activity, wherein the site of enzymatic activity is determined by the guide RNA; and (2) a reagent for reconstitution and/or dilution of the expression vector.

[0341] The present disclosure provides a kit comprising: (1) a recombinant expression vector comprising: (i) a nucleotide sequence encoding a guide RNA, wherein the guide RNA comprises: (a) a first segment comprising a nucleotide sequence that is complementary to a sequence in a target DNA; and (b) a second segment that interacts with a site-directed modifying polypeptide; and (ii) a nucleotide sequence encoding the site-directed modifying polypeptide, wherein the site-directed modifying polypeptide comprises: (a) an RNA-binding portion that interacts with the guide RNA; and (b) an activity portion that modulates transcription within the target DNA, wherein the site of modulated transcription within the target DNA is determined by the guide RNA; and (2) a reagent for reconstitution and/or dilution of the recombinant expression vector.

[0342] The present disclosure provides a kit comprising: (1) a recombinant expression vector comprising a nucleic acid comprising a nucleotide sequence that encodes a DNA targeting RNA comprising: (i) a first segment comprising a nucleotide sequence that is complementary to a sequence in a target DNA; and (ii) a second segment that interacts with a site-directed modifying polypeptide; and (2) a reagent for reconstitution and/or dilution of the recombinant expression vector. In some embodiments of this kit, the kit comprises: a recombinant expression vector comprising a nucleotide sequence that encodes a site-directed modifying polypeptide, wherein the site-directed modifying polypeptide comprises: (a) an RNA-binding portion that interacts with the guide RNA; and (b) an activity portion that exhibits site-directed enzymatic activity, wherein the site of enzymatic activity is determined by the guide RNA. In other embodiments of this kit, the kit comprises: a recombinant expression vector comprising a nucleotide sequence that encodes a site-directed modifying polypeptide, wherein the site-directed modifying polypeptide comprises: (a) an RNA-binding portion that interacts with the guide RNA; and (b) an activity portion that modulates transcription within the target DNA, wherein the site of modulated transcription within the target DNA is determined by the guide RNA.

[0343] In some embodiments of any of the above kits, the kit comprises an activator-RNA or a targeter-RNA. In some embodiments of any of the above kits, the kit comprises a single-molecule guide RNA. In some embodiments of any of the above kits, the kit comprises two or more double-molecule or single-molecule guide RNAs. In some embodiments of any of the above kits, a guide RNA (e.g., including two or more guide RNAs) can be provided as an array (e.g., an array of RNA molecules, an array of DNA molecules encoding the guide RNA(s), etc.). Such kits can be useful, for example, for use in conjunction with the above described genetically modified host cells that comprise a site-directed modifying polypeptide. In some embodiments of any of the above kits, the kit further comprises a donor polynucleotide to effect the desired genetic modification. Components of a kit can be in separate containers; or can be combined in a single container.

[0344] In some cases, a kit further comprises one or more variant Cas9 site-directed polypeptides that exhibits reduced endodeoxyribonuclease activity relative to wild-type Cas9.

[0345] In some cases, a kit further comprises one or more nucleic acids comprising a nucleotide sequence encoding a variant Cas9 site-directed polypeptide that exhibits reduced endodeoxyribonuclease activity relative to wild-type Cas9.

[0346] Any of the above-described kits can further include one or more additional reagents, where such additional reagents can be selected from: a dilution buffer; a reconstitution solution; a wash buffer; a control reagent; a control expression vector or RNA polynucleotide; a reagent for in vitro production of the site-directed modifying polypeptide from DNA, and the like.

[0347] In addition to above-mentioned components, a kit can further include instructions for using the components of the kit to practice the methods. The instructions for practicing the methods are generally recorded on a suitable recording medium. For example, the instructions may be printed on a substrate, such as paper or plastic, etc. As such, the instructions may be present in the kits as a package insert, in the labeling of the container of the kit or components thereof (i.e., associated with the packaging or subpackaging) etc. In other embodiments, the instructions are present as an electronic storage data file present on a suitable computer readable storage medium, e.g. CD-ROM, diskette, flash drive, etc. In yet other embodiments, the actual instructions are not present in the kit, but means for obtaining the instructions from a remote source, e.g. via the Internet, are provided. An example of this embodiment is a kit that includes a web address where the instructions can be viewed and/or from which the instructions can be downloaded. As with the instructions, this means for obtaining the instructions is recorded on a suitable substrate.

[0348] Non-Human Genetically Modified Organisms

[0349] In some embodiments, a genetically modified host cell has been genetically modified with an exogenous nucleic acid comprising a nucleotide sequence encoding a site-directed modifying polypeptide (e.g., a naturally occurring Cas9; a modified, i.e., mutated or variant, Cas9; a chimeric Cas9; etc.). If such a cell is a eukaryotic single-cell organism, then the modified cell can be considered a genetically modified organism. In some embodiments, the non-human genetically modified organism is a Cas9 transgenic multicellular organism.

[0350] In some embodiments, a genetically modified non-human host cell (e.g., a cell that has been genetically modified with an exogenous nucleic acid comprising a nucleotide sequence encoding a site-directed modifying polypeptide, e.g., a naturally occurring Cas9; a modified, i.e., mutated or variant, Cas9; a chimeric Cas9; etc.) can generate a genetically modified nonhuman organism (e.g., a mouse, a fish, a frog, a fly, a worm, etc.). For example, if the genetically modified host cell is a pluripotent stem cell (i.e., PSC) or a germ cell (e.g., sperm, oocyte, etc.), an entire genetically modified organism can be derived from the genetically modified host cell. In some embodiments, the genetically modified host cell is a pluripotent stem cell (e.g., ESC, iPSC, pluripotent plant stem cell, etc.) or a germ cell (e.g., sperm cell, oocyte, etc.), either in vivo or in vitro, that can give rise to a genetically modified organism. In some embodiments the genetically modified host cell is a vertebrate PSC (e.g., ESC, iPSC, etc.) and is used to generate a genetically modified organism (e.g. by injecting a PSC into a blastocyst to produce a chimeric/mosaic animal, which could then be mated to generate non-chimeric/non-mosaic genetically modified organisms; grafting in the case of plants; etc.). Any convenient method/protocol for producing a genetically modified organism, including the methods described herein, is suitable for producing a genetically modified host cell comprising an exogenous nucleic acid comprising a nucleotide sequence encoding a site-directed modifying polypeptide (e.g., a naturally occurring Cas9; a modified, i.e., mutated or variant, Cas9; a chimeric Cas9; etc.). Methods of producing genetically modified organisms are known in the art. For example, see Cho et al., Curr Protoc Cell Biol. 2009 March; Chapter 19:Unit 19.11: Generation of transgenic mice; Gama et al., Brain Struct Funct. 2010 March; 214(2-3):91-109. Epub 2009 November 25: Animal transgenesis: an overview; Husaini et al., GM Crops. 2011 June-December; 2(3):150-62. Epub 2011 Jun 1: Approaches for gene targeting and targeted gene expression in plants.

[0351] In some embodiments, a genetically modified organism comprises a target cell for methods of the invention, and thus can be considered a source for target cells. For example, if a genetically modified cell comprising an exogenous nucleic acid comprising a nucleotide sequence encoding a site-directed modifying polypeptide (e.g., a naturally occurring Cas9; a modified, i.e., mutated or variant, Cas9; a chimeric Cas9; etc.) is used to generate a genetically modified organism, then the cells of the genetically modified organism comprise the exogenous nucleic acid comprising a nucleotide sequence encoding a site-directed modifying polypeptide (e.g., a naturally occurring Cas9; a modified, i.e., mutated or variant, Cas9; a chimeric Cas9; etc.). In some such embodiments, the DNA of a cell or cells of the genetically modified organism can be targeted for modification by introducing into the cell or cells a guide RNA (or a DNA encoding a guide RNA) and optionally a donor nucleic acid. For example, the introduction of a guide RNA (or a DNA encoding a guide RNA) into a subset of cells (e.g., brain cells, intestinal cells, kidney cells, lung cells, blood cells, etc.) of the genetically modified organism can target the DNA of such cells for modification, the genomic location of which will depend on the DNA-targeting sequence of the introduced guide RNA.

[0352] In some embodiments, a genetically modified organism is a source of target cells for methods of the invention. For example, a genetically modified organism comprising cells that are genetically modified with an exogenous nucleic acid comprising a nucleotide sequence encoding a site-directed modifying polypeptide (e.g., a naturally occurring Cas9; a modified, i.e., mutated or variant, Cas9; a chimeric Cas9; etc.) can provide a source of genetically modified cells, for example PSCs (e.g., ESCs, iPSCs, sperm, oocytes, etc.), neurons, progenitor cells, cardiomyocytes, etc.

[0353] In some embodiments, a genetically modified cell is a PSC comprising an exogenous nucleic acid comprising a nucleotide sequence encoding a site-directed modifying polypeptide (e.g., a naturally occurring Cas9; a modified, i.e., mutated or variant, Cas9; a chimeric Cas9; etc.). As such, the PSC can be a target cell such that the DNA of the PSC can be targeted for modification by introducing into the PSC a guide RNA (or a DNA encoding a guide RNA) and optionally a donor nucleic acid, and the genomic location of the modification will depend on the DNA-targeting sequence of the introduced guide RNA. Thus, in some embodiments, the methods described herein can be used to modify the DNA (e.g., delete and/or replace any desired genomic location) of PSCs derived from a genetically modified organism. Such modified PSCs can then be used to generate organisms having both (i) an exogenous nucleic acid comprising a nucleotide sequence encoding a site-directed modifying polypeptide (e.g., a naturally occurring Cas9; a modified, i.e., mutated or variant, Cas9; a chimeric Cas9; etc.) and (ii) a DNA modification that was introduced into the PSC.

[0354] An exogenous nucleic acid comprising a nucleotide sequence encoding a site-directed modifying polypeptide (e.g., a naturally occurring Cas9; a modified, i.e., mutated or variant, Cas9; a chimeric Cas9; etc.) can be under the control of (i.e., operably linked to) an unknown promoter (e.g., when the nucleic acid randomly integrates into a host cell genome) or can be under the control of (i.e., operably linked to) a known promoter. Suitable known promoters can be any known promoter and include constitutively active promoters (e.g., CMV promoter), inducible promoters (e.g., heat shock promoter, Tetracycline-regulated promoter, Steroid-regulated promoter, Metal-regulated promoter, estrogen receptor-regulated promoter, etc.), spatially restricted and/or temporally restricted promoters (e.g., a tissue specific promoter, a cell type specific promoter, etc.), etc.

[0355] A genetically modified organism (e.g. an organism whose cells comprise a nucleotide sequence encoding a site-directed modifying polypeptide, e.g., a naturally occurring Cas9; a modified, i.e., mutated or variant, Cas9; a chimeric Cas9; etc.) can be any organism including for example, a plant; algae; an invertebrate (e.g., a cnidarian, an echinoderm, a worm, a fly, etc.); a vertebrate (e.g., a fish (e.g., zebrafish, puffer fish, gold fish, etc.), an amphibian (e.g., salamander, frog, etc.), a reptile, a bird, a mammal, etc.); an ungulate (e.g., a goat, a pig, a sheep, a cow, etc.); a rodent (e.g., a mouse, a rat, a hamster, a guinea pig); a lagomorpha (e.g., a rabbit); etc.

[0356] In some cases, the site-directed modifying polypeptide comprises an amino acid sequence having at least about 75%, at least about 80%, at least about 85%, at least about 90%, at least about 95%, at least about 99%, or 100%, amino acid sequence identity to amino acids 7-166 and/or 731-1003 of SEQ ID NO: 8, or to the corresponding portions in any of the amino acid sequences set forth as SEQ ID NOs: 1-800.

[0357] Transgenic Non-Human Animals

[0358] As described above, in some embodiments, a nucleic acid (e.g., a nucleotide sequence encoding a site-directed modifying polypeptide, e.g., a naturally occurring Cas9; a modified, i.e., mutated or variant, Cas9; a chimeric Cas9; etc.) or a recombinant expression vector is used as a transgene to generate a transgenic animal that produces a site-directed modifying polypeptide. Thus, the present disclosure further provides a transgenic non-human animal, which animal comprises a transgene comprising a nucleic acid comprising a nucleotide sequence encoding a site-directed modifying polypeptide, e.g., a naturally occurring Cas9; a modified, i.e., mutated or variant, Cas9; a chimeric Cas9; etc., as described above. In some embodiments, the genome of the transgenic non-human animal comprises a nucleotide sequence encoding a site-directed modifying polypeptide. In some embodiments, the transgenic non-human animal is homozygous for the genetic modification. In some embodiments, the transgenic non-human animal is heterozygous for the genetic modification. In some embodiments, the transgenic non-human animal is a vertebrate, for example, a fish (e.g., zebra fish, gold fish, puffer fish, cave fish, etc.), an amphibian (frog, salamander, etc.), a bird (e.g., chicken, turkey, etc.), a reptile (e.g., snake, lizard, etc.), a mammal (e.g., an ungulate, e.g., a pig, a cow, a goat, a sheep, etc.; a lagomorph (e.g., a rabbit); a rodent (e.g., a rat, a mouse); a nonhuman primate; etc.), etc.

[0359] An exogenous nucleic acid comprising a nucleotide sequence encoding a site-directed modifying polypeptide (e.g., a naturally occurring Cas9; a modified, i.e., mutated or variant, Cas9; a chimeric Cas9; etc.) can be under the control of (i.e., operably linked to) an unknown promoter (e.g., when the nucleic acid randomly integrates into a host cell genome) or can be under the control of (i.e., operably linked to) a known promoter. Suitable known promoters can be any known promoter and include constitutively active promoters (e.g., CMV promoter), inducible promoters (e.g., heat shock promoter, Tetracycline-regulated promoter, Steroid-regulated promoter, Metal-regulated promoter, estrogen receptor-regulated promoter, etc.), spatially restricted and/or temporally restricted promoters (e.g., a tissue specific promoter, a cell type specific promoter, etc.), etc.

[0360] In some cases, the site-directed modifying polypeptide comprises an amino acid sequence having at least about 75%, at least about 80%, at least about 85%, at least about 90%, at least about 95%, at least about 99%, or 100%, amino acid sequence identity to amino acids 7-166 and/or 731-1003 of SEQ ID NO: 8, or to the corresponding portions in any of the amino acid sequences set forth as SEQ ID NOs: 1-800.

[0361] Transgenic Plants

[0362] As described above, in some embodiments, a nucleic acid (e.g., a nucleotide sequence encoding a site-directed modifying polypeptide, e.g., a naturally occurring Cas9; a modified, i.e., mutated or variant, Cas9; a chimeric Cas9; etc.) or a recombinant expression vector is used as a transgene to generate a transgenic plant that produces a site-directed modifying polypeptide. Thus, the present disclosure further provides a transgenic plant, which plant comprises a transgene comprising a nucleic acid comprising a nucleotide sequence encoding site-directed modifying polypeptide, e.g., a naturally occurring Cas9; a modified, i.e., mutated or variant, Cas9; a chimeric Cas9; etc., as described above. In some embodiments, the genome of the transgenic plant comprises a nucleic acid. In some embodiments, the transgenic plant is homozygous for the genetic modification. In some embodiments, the transgenic plant is heterozygous for the genetic modification.

[0363] Methods of introducing exogenous nucleic acids into plant cells are well known in the art. Such plant cells are considered “transformed,” as defined above. Suitable methods include viral infection (such as double stranded DNA viruses), transfection, conjugation, protoplast fusion, electroporation, particle gun technology, calcium phosphate precipitation, direct microinjection, silicon carbide whiskers technology, Agrobacterium-mediated transformation and the like. The choice of method is generally dependent on the type of cell being transformed and the circumstances under which the transformation is taking place (i.e. in vitro, ex vivo, or in vivo). Transformation methods based upon the soil bacterium Agrobacterium tumefaciens are particularly useful for introducing an exogenous nucleic acid molecule into a vascular plant. The wild type form of Agrobacterium contains a Ti (tumor-inducing) plasmid that directs production of tumorigenic crown gall growth on host plants. Transfer of the tumor-inducing T-DNA region of the Ti plasmid to a plant genome requires the Ti plasmid-encoded virulence genes as well as T-DNA borders, which are a set of direct DNA repeats that delineate the region to be transferred. An Agrobacterium-based vector is a modified form of a Ti plasmid, in which the tumor inducing functions are replaced by the nucleic acid sequence of interest to be introduced into the plant host.

[0364] Agrobacterium-mediated transformation generally employs cointegrate vectors or binary vector systems, in which the components of the Ti plasmid are divided between a helper vector, which resides permanently in the Agrobacterium host and carries the virulence genes, and a shuttle vector, which contains the gene of interest bounded by T-DNA sequences. A variety of binary vectors are well known in the art and are commercially available, for example, from Clontech (Palo Alto, Calif.). Methods of coculturing Agrobacterium with cultured plant cells or wounded tissue such as leaf tissue, root explants, hypocotyledons, stem pieces or tubers, for example, also are well known in the art. See., e.g., Glick and Thompson, (eds.), Methods in Plant Molecular Biology and Biotechnology, Boca Raton, Fla.: CRC Press (1993).

[0365] Microprojectile-mediated transformation also can be used to produce a transgenic plant. This method, first described by Klein et al. (Nature 327:70-73 (1987)), relies on microprojectiles such as gold or tungsten that are coated with the desired nucleic acid molecule by precipitation with calcium chloride, spermidine or polyethylene glycol. The microprojectile particles are accelerated at high speed into an angiosperm tissue using a device such as the BIOLISTIC PD-1000 (Biorad; Hercules Calif.).

[0366] A nucleic acid may be introduced into a plant in a manner such that the nucleic acid is able to enter a plant cell(s), e.g., via an in vivo or ex vivo protocol. By “in vivo,” it is meant in the nucleic acid is administered to a living body of a plant e.g. infiltration. By “ex vivo” it is meant that cells or explants are modified outside of the plant, and then such cells or organs are regenerated to a plant. A number of vectors suitable for stable transformation of plant cells or for the establishment of transgenic plants have been described, including those described in Weissbach and Weissbach, (1989) Methods for Plant Molecular Biology Academic Press, and Gelvin et al., (1990) Plant Molecular Biology Manual, Kluwer Academic Publishers. Specific examples include those derived from a Ti plasmid of Agrobacterium tumefaciens, as well as those disclosed by Herrera-Estrella et al. (1983) Nature 303: 209, Bevan (1984) Nucl Acid Res. 12: 8711-8721, Klee (1985) Bio/Technolo 3: 637-642. Alternatively, non-Ti vectors can be used to transfer the DNA into plants and cells by using free DNA delivery techniques. By using these methods transgenic plants such as wheat, rice (Christou (1991) Bio/Technology 9:957-9 and 4462) and corn (Gordon-Kamm (1990) Plant Cell 2: 603-618) can be produced. An immature embryo can also be a good target tissue for monocots for direct DNA delivery techniques by using the particle gun (Weeks et al. (1993) Plant Physiol 102: 1077-1084; Vasil (1993) Bio/Technolo 10: 667-674; Wan and Lemeaux (1994) Plant Physiol 104: 37-48 and for Agrobacterium-mediated DNA transfer (Ishida et al. (1996) Nature Biotech 14: 745-750). Exemplary methods for introduction of DNA into chloroplasts are biolistic bombardment, polyethylene glycol transformation of protoplasts, and microinjection (Daniell et al Nat. Biotechnol 16:345-348, 1998; Staub et al Nat. Biotechnol 18: 333-338, 2000; O'Neill et al Plant J. 3:729-738, 1993; Knoblauch et al Nat. Biotechnol 17: 906-909; U.S. Pat. Nos. 5,451,513, 5,545,817, 5,545,818, and 5,576,198; in Intl. Application No. WO 95/16783; and in Boynton et al., Methods in Enzymology 217: 510-536 (1993), Svab et al., Proc. Natl. Acad. Sci. USA 90: 913-917 (1993), and McBride et al., Proc. Nati. Acad. Sci. USA 91: 7301-7305 (1994)). Any vector suitable for the methods of biolistic bombardment, polyethylene glycol transformation of protoplasts and microinjection will be suitable as a targeting vector for chloroplast transformation. Any double stranded DNA vector may be used as a transformation vector, especially when the method of introduction does not utilize Agrobacterium.

[0367] Plants which can be genetically modified include grains, forage crops, fruits, vegetables, oil seed crops, palms, forestry, and vines. Specific examples of plants which can be modified follow: maize, banana, peanut, field peas, sunflower, tomato, canola, tobacco, wheat, barley, oats, potato, soybeans, cotton, carnations, sorghum, lupin and rice.

[0368] Also provided by the disclosure are transformed plant cells, tissues, plants and products that contain the transformed plant cells. A feature of the transformed cells, and tissues and products that include the same is the presence of a nucleic acid integrated into the genome, and production by plant cells of a site-directed modifying polypeptide, e.g., a naturally occurring Cas9; a modified, i.e., mutated or variant, Cas9; a chimeric Cas9; etc. Recombinant plant cells of the present invention are useful as populations of recombinant cells, or as a tissue, seed, whole plant, stem, fruit, leaf, root, flower, stem, tuber, grain, animal feed, a field of plants, and the like.

[0369] A nucleic acid comprising a nucleotide sequence encoding a site-directed modifying polypeptide (e.g., a naturally occurring Cas9; a modified, i.e., mutated or variant, Cas9; a chimeric Cas9; etc.) can be under the control of (i.e., operably linked to) an unknown promoter (e.g., when the nucleic acid randomly integrates into a host cell genome) or can be under the control of (i.e., operably linked to) a known promoter. Suitable known promoters can be any known promoter and include constitutively active promoters, inducible promoters, spatially restricted and/or temporally restricted promoters, etc.

[0370] In some cases, the site-directed modifying polypeptide comprises an amino acid sequence having at least about 75%, at least about 80%, at least about 85%, at least about 90%, at least about 95%, at least about 99%, or 100%, amino acid sequence identity to amino acids 7-166 and/or 731-1003 of SEQ ID NO: 8, or to the corresponding portions in any of the amino acid sequences set forth as SEQ ID NOs: 1-800. Also provided by the disclosure is reproductive material of a transgenic plant, where reproductive material includes seeds, progeny plants and clonal material.

[0371] Detailed Description—Part II

[0372] The present disclosure provides methods of modulating transcription of a target nucleic acid in a host cell. The methods generally involve contacting the target nucleic acid with an enzymatically inactive Cas9 polypeptide and a single-guide RNA. The methods are useful in a variety of applications, which are also provided.

[0373] A transcriptional modulation method of the present disclosure overcomes some of the drawbacks of methods involving RNAi. A transcriptional modulation method of the present disclosure finds use in a wide variety of applications, including research applications, drug discovery (e.g., high throughput screening), target validation, industrial applications (e.g., crop engineering; microbial engineering, etc.), diagnostic applications, therapeutic applications, and imaging techniques.

[0374] Methods of Modulating Transcription

[0375] The present disclosure provides a method of selectively modulating transcription of a target DNA in a host cell. The method generally involves: a) introducing into the host cell: i) a guide RNA, or a nucleic acid comprising a nucleotide sequence encoding the guide RNA; and ii) a variant Cas9 site-directed polypeptide (“variant Cas9 polypeptide”), or a nucleic acid comprising a nucleotide sequence encoding the variant Cas9 polypeptide, where the variant Cas9 polypeptide exhibits reduced endodeoxyribonuclease activity.

[0376] The guide RNA (also referred to herein as “guide RNA”; or “gRNA”) comprises: i) a first segment comprising a nucleotide sequence that is complementary to a target sequence in a target DNA; ii) a second segment that interacts with a site-directed polypeptide; and iii) a transcriptional terminator. The first segment, comprising a nucleotide sequence that is complementary to a target sequence in a target DNA, is referred to herein as a “targeting segment”. The second segment, which interacts with a site-directed polypeptide, is also referred to herein as a “protein-binding sequence” or “dCas9-binding hairpin,” or “dCas9 handle.” By “segment” it is meant a segment/section/region of a molecule, e.g., a contiguous stretch of nucleotides in an RNA. The definition of “segment,” unless otherwise specifically defined in a particular context, is not limited to a specific number of total base pairs, and may include regions of RNA molecules that are of any total length and may or may not include regions with complementarity to other molecules. As described above, guide RNA according to the present disclosure can be a single-molecule guide RNA or a two-molecule guide RNA. The term “guide RNA” or “gRNA” is inclusive, referring both to two-molecule guide RNAs and to single-molecule guide RNAs (i.e., sgRNAs).

[0377] The variant Cas9 site-directed polypeptide comprises: i) an RNA-binding portion that interacts with the guide RNA; and an activity portion that exhibits reduced endodeoxyribonuclease activity.

[0378] The guide RNA and the variant Cas9 polypeptide form a complex in the host cell; the complex selectively modulates transcription of a target DNA in the host cell.

[0379] In some cases, a transcription modulation method of the present disclosure provides for selective modulation (e.g., reduction or increase) of a target nucleic acid in a host cell. For example, “selective” reduction of transcription of a target nucleic acid reduces transcription of the target nucleic acid by at least about 10%, at least about 20%, at least about 30%, at least about 40%, at least about 50%, at least about 60%, at least about 70%, at least about 80%, at least about 90%, or greater than 90%, compared to the level of transcription of the target nucleic acid in the absence of a guide RNA/variant Cas9 polypeptide complex. Selective reduction of transcription of a target nucleic acid reduces transcription of the target nucleic acid, but does not substantially reduce transcription of a non-target nucleic acid, e.g., transcription of a non-target nucleic acid is reduced, if at all, by less than 10% compared to the level of transcription of the non-target nucleic acid in the absence of the guide RNA/variant Cas9 polypeptide complex.

[0380] Increased Transcription

[0381] “Selective” increased transcription of a target DNA can increase transcription of the target DNA by at least about 1.1 fold (e.g., at least about 1.2 fold, at least about 1.3 fold, at least about 1.4 fold, at least about 1.5 fold, at least about 1.6 fold, at least about 1.7 fold, at least about 1.8 fold, at least about 1.9 fold, at least about 2 fold, at least about 2.5 fold, at least about 3 fold, at least about 3.5 fold, at least about 4 fold, at least about 4.5 fold, at least about 5 fold, at least about 6 fold, at least about 7 fold, at least about 8 fold, at least about 9 fold, at least about 10 fold, at least about 12 fold, at least about 15 fold, or at least about 20-fold) compared to the level of transcription of the target DNA in the absence of a guide RNA/variant Cas9 polypeptide complex. Selective increase of transcription of a target DNA increases transcription of the target DNA, but does not substantially increase transcription of a non-target DNA, e.g., transcription of a non-target DNA is increased, if at all, by less than about 5-fold (e.g., less than about 4-fold, less than about 3-fold, less than about 2-fold, less than about 1.8-fold, less than about 1.6-fold, less than about 1.4-fold, less than about 1.2-fold, or less than about 1.1-fold) compared to the level of transcription of the non-targeted DNA in the absence of the guide RNA/variant Cas9 polypeptide complex.

[0382] As a non-limiting example, increased transcription can be achieved by fusing dCas9 to a heterologous sequence. Suitable fusion partners include, but are not limited to, a polypeptide that provides an activity that indirectly increases transcription by acting directly on the target DNA or on a polypeptide (e.g., a histone or other DNA-binding protein) associated with the target DNA. Suitable fusion partners include, but are not limited to, a polypeptide that provides for methyltransferase activity, demethylase activity, acetyltransferase activity, deacetylase activity, kinase activity, phosphatase activity, ubiquitin ligase activity, deubiquitinating activity, adenylation activity, deadenylation activity, SUMOylating activity, deSUMOylating activity, ribosylation activity, deribosylation activity, myristoylation activity, or demyristoylation activity.

[0383] Additional suitable fusion partners include, but are not limited to, a polypeptide that directly provides for increased transcription of the target nucleic acid (e.g., a transcription activator or a fragment thereof, a protein or fragment thereof that recruits a transcription activator, a small molecule/drug-responsive transcription regulator, etc.).

[0384] A non-limiting example of a method using a dCas9 fusion protein to increase transcription in a prokaryote includes a modification of the bacterial one-hybrid (B1H) or two-hybrid (B2H) system. In the B1H system, a DNA binding domain (BD) is fused to a bacterial transcription activation domain (AD, e.g., the alpha subunit of the Escherichia coli RNA polymerase (RNAPa)). Thus, a dCas9 can be fused to a heterologous sequence comprising an AD. When the dCas9 fusion protein arrives at the upstream region of a promoter (targeted there by the guide RNA) the AD (e.g., RNAPa) of the dCas9 fusion protein recruits the RNAP holoenzyme, leading to transcription activation. In the B2H system, the BD is not directly fused to the AD; instead, their interaction is mediated by a protein-protein interaction (e.g., GAL11P-GAL4 interaction). To modify such a system for use in the methods, dCas9 can be fused to a first protein sequence that provides for protein-protein interaction (e.g., the yeast GAL11P and/or GAL4 protein) and RNAa can be fused to a second protein sequence that completes the protein-protein interaction (e.g., GAL4 if GAL11P is fused to dCas9, GAL11P if GAL4 is fused to dCas9, etc.). The binding affinity between GAL11P and GAL4 increases the efficiency of binding and transcription firing rate.

[0385] A non-limiting example of a method using a dCas9 fusion protein to increase transcription in a eukaryotes includes fusion of dCas9 to an activation domain (AD) (e.g., GAL4, herpesvirus activation protein VP16 or VP64, human nuclear factor NF-κB p65 subunit, etc.). To render the system inducible, expression of the dCas9 fusion protein can be controlled by an inducible promoter (e.g., Tet-ON, Tet-OFF, etc.). The guide RNA can be design to target known transcription response elements (e.g., promoters, enhancers, etc.), known upstream activating sequences (UAS), sequences of unknown or known function that are suspected of being able to control expression of the target DNA, etc.

[0386] Additional Fusion Partners

[0387] Non-limiting examples of fusion partners to accomplish increased or decreased transcription include, but are not limited to, transcription activator and transcription repressor domains (e.g., the Kriippel associated box (KRAB or SKD); the Mad mSIN3 interaction domain (SID); the ERF repressor domain (ERD), etc). In some such cases, the dCas9 fusion protein is targeted by the guide RNA to a specific location (i.e., sequence) in the target DNA and exerts locus-specific regulation such as blocking RNA polymerase binding to a promoter (which selectively inhibits transcription activator function), and/or modifying the local chromatin status (e.g., when a fusion sequence is used that modifies the target DNA or modifies a polypeptide associated with the target DNA). In some cases, the changes are transient (e.g., transcription repression or activation). In some cases, the changes are inheritable (e.g., when epigenetic modifications are made to the target DNA or to proteins associated with the target DNA, e.g., nucleosomal histones).

[0388] In some embodiments, the heterologous sequence can be fused to the C-terminus of the dCas9 polypeptide. In some embodiments, the heterologous sequence can be fused to the N-terminus of the dCas9 polypeptide. In some embodiments, the heterologous sequence can be fused to an internal portion (i.e., a portion other than the N- or C-terminus) of the dCas9 polypeptide.

[0389] The biological effects of a method using a dCas9 fusion protein can be detected by any convenient method (e.g., gene expression assays; chromatin-based assays, e.g., Chromatin immunoPrecipitation (ChiP), Chromatin in vivo Assay (CiA), etc.; and the like).

[0390] In some cases, a method involves use of two or more different guide RNAs. For example, two different guide RNAs can be used in a single host cell, where the two different guide RNAs target two different target sequences in the same target nucleic acid.

[0391] Thus, for example, a transcriptional modulation method can further comprise introducing into the host cell a second guide RNA, or a nucleic acid comprising a nucleotide sequence encoding the second guide RNA, where the second guide RNA comprises: i) a first segment comprising a nucleotide sequence that is complementary to a second target sequence in the target DNA; ii) a second segment that interacts with the site-directed polypeptide; and iii) a transcriptional terminator. In some cases, use of two different guide RNAs targeting two different targeting sequences in the same target nucleic acid provides for increased modulation (e.g., reduction or increase) in transcription of the target nucleic acid.

[0392] As another example, two different guide RNAs can be used in a single host cell, where the two different guide RNAs target two different target nucleic acids. Thus, for example, a transcriptional modulation method can further comprise introducing into the host cell a second guide RNA, or a nucleic acid comprising a nucleotide sequence encoding the second guide RNA, where the second guide RNA comprises: i) a first segment comprising a nucleotide sequence that is complementary to a target sequence in at least a second target DNA; ii) a second segment that interacts with the site-directed polypeptide; and iii) a transcriptional terminator.

[0393] In some embodiments, a nucleic acid (e.g., a guide RNA, e.g., a single-molecule guide RNA, an activator-RNA, a targeter-RNA, etc.; a donor polynucleotide; a nucleic acid encoding a site-directed modifying polypeptide; etc.) comprises a modification or sequence that provides for an additional desirable feature (e.g., modified or regulated stability; subcellular targeting; tracking, e.g., a fluorescent label; a binding site for a protein or protein complex; etc.). Non-limiting examples include: a 5′ cap (e.g., a 7-methylguanylate cap (m⁷G)); a 3′ polyadenylated tail (i.e., a 3′ poly(A) tail); a riboswitch sequence or an aptamer sequence (e.g., to allow for regulated stability and/or regulated accessibility by proteins and/or protein complexes); a terminator sequence; a sequence that forms a dsRNA duplex (i.e., a hairpin)); a modification or sequence that targets the RNA to a subcellular location (e.g., nucleus, mitochondria, chloroplasts, and the like); a modification or sequence that provides for tracking (e.g., direct conjugation to a fluorescent molecule, conjugation to a moiety that facilitates fluorescent detection, a sequence that allows for fluorescent detection, etc.); a modification or sequence that provides a binding site for proteins (e.g., proteins that act on DNA, including transcriptional activators, transcriptional repressors, DNA methyltransferases, DNA demethylases, histone acetyltransferases, histone deacetylases, and the like); and combinations thereof.

[0394] DNA-Targeting Segment

[0395] The DNA-targeting segment (or “DNA-targeting sequence”) of a guide RNA comprises a nucleotide sequence that is complementary to a specific sequence within a target DNA (the complementary strand of the target DNA).

[0396] In other words, the DNA-targeting segment of a guide RNA interacts with a target DNA in a sequence-specific manner via hybridization (i.e., base pairing). As such, the nucleotide sequence of the DNA-targeting segment may vary and determines the location within the target DNA that the guide RNA and the target DNA will interact. The DNA-targeting segment of a guide RNA can be modified (e.g., by genetic engineering) to hybridize to any desired sequence within a target DNA.

[0397] Stability Control Sequence (e.g., Transcriptional Terminator Segment)

[0398] A stability control sequence influences the stability of an RNA (e.g., a guide RNA, a targeter-RNA, an activator-RNA, etc.). One example of a suitable stability control sequence is a transcriptional terminator segment (i.e., a transcription termination sequence). A transcriptional terminator segment of a guide RNA can have a total length of from about 10 nucleotides to about 100 nucleotides, e.g., from about 10 nucleotides (nt) to about 20 nt, from about 20 nt to about 30 nt, from about 30 nt to about 40 nt, from about 40 nt to about 50 nt, from about 50 nt to about 60 nt, from about 60 nt to about 70 nt, from about 70 nt to about 80 nt, from about 80 nt to about 90 nt, or from about 90 nt to about 100 nt. For example, the transcriptional terminator segment can have a length of from about 15 nucleotides (nt) to about 80 nt, from about 15 nt to about 50 nt, from about 15 nt to about 40 nt, from about 15 nt to about 30 nt or from about 15 nt to about 25 nt.

[0399] In some cases, the transcription termination sequence is one that is functional in a eukaryotic cell. In some cases, the transcription termination sequence is one that is functional in a prokaryotic cell.

[0400] Nucleotide sequences that can be included in a stability control sequence (e.g., transcriptional termination segment, or in any segment of the guide RNA to provide for increased stability) include, for example, 5′-UAAUCCCACAGCCGCCAGUUCCGCUGGCGGCAUUUU-5′ (a Rho-independent trp termination site).

[0401] Additional Sequences

[0402] In some embodiments, a guide RNA comprises at least one additional segment at either the 5′ or 3′ end. For example, a suitable additional segment can comprise a 5′ cap (e.g., a 7-methylguanylate cap (m⁷G)); a 3′ polyadenylated tail (i.e., a 3′ poly(A) tail); a riboswitch sequence (e.g., to allow for regulated stability and/or regulated accessibility by proteins and protein complexes); a sequence that forms a dsRNA duplex (i.e., a hairpin)); a sequence that targets the RNA to a subcellular location (e.g., nucleus, mitochondria, chloroplasts, and the like); a modification or sequence that provides for tracking (e.g., direct conjugation to a fluorescent molecule, conjugation to a moiety that facilitates fluorescent detection, a sequence that allows for fluorescent detection, etc.); a modification or sequence that provides a binding site for proteins (e.g., proteins that act on DNA, including transcriptional activators, transcriptional repressors, DNA methyltransferases, DNA demethylases, histone acetyltransferases, histone deacetylases, and the like) a modification or sequence that provides for increased, decreased, and/or controllable stability; and combinations thereof.

[0403] Multiple Simultaneous Guide RNAs

[0404] In some embodiments, multiple guide RNAs are used simultaneously in the same cell to simultaneously modulate transcription at different locations on the same target DNA or on different target DNAs. In some embodiments, two or more guide RNAs target the same gene or transcript or locus. In some embodiments, two or more guide RNAs target different unrelated loci. In some embodiments, two or more guide RNAs target different, but related loci.

[0405] Because the guide RNAs are small and robust they can be simultaneously present on the same expression vector and can even be under the same transcriptional control if so desired. In some embodiments, two or more (e.g., 3 or more, 4 or more, 5 or more, 10 or more, 15 or more, 20 or more, 25 or more, 30 or more, 35 or more, 40 or more, 45 or more, or 50 or more) guide RNAs are simultaneously expressed in a target cell (from the same or different vectors). The expressed guide RNAs can be differently recognized by Cas9 proteins from different bacteria, such as S. pyogenes, S. thermophilus, L. innocua, and N. meningitidis.

[0406] In some cases, multiple guide RNAs can be encoded in an array mimicking naturally occurring CRISPR arrays of targeter RNAs and corresponding tracrRNAs (activator RNAs). The targeting segments are encoded as approximately 30 nucleotide long sequences (can be about 16 to about 100 nt) and are separated by CRISPR repeat sequences. In some cases, the array and tracrRNAs are introduced to a cell by DNAs encoding the RNAs. In some cases, they are introduced to the cell as RNAs.

[0407] To express multiple guide RNAs, an artificial RNA processing system mediated by the Csy4 endoribonuclease can be used. Multiple guide RNAs can be concatenated into a tandem array on a precursor transcript (e.g., expressed from a U6 promoter), and separated by Csy4-specific RNA sequence. Co-expressed Csy4 protein cleaves the precursor transcript into multiple guide RNAs. Advantages for using an RNA processing system include: first, there is no need to use multiple promoters; second, since all guide RNAs are processed from a precursor transcript, their concentrations are normalized for similar dCas9-binding.

[0408] Csy4 is a small endoribonuclease (RNase) protein derived from bacteria Pseudomonas aeruginosa. Csy4 specifically recognizes a minimal 17-bp RNA hairpin, and exhibits rapid (<1 min) and highly efficient (>99.9%) RNA cleavage. Unlike most RNases, the cleaved RNA fragment remains stable and functionally active. The Csy4-based RNA cleavage can be repurposed into an artificial RNA processing system. In this system, the 17-bp RNA hairpins are inserted between multiple RNA fragments that are transcribed as a precursor transcript from a single promoter. Co-expression of Csy4 is effective in generating individual RNA fragments.

[0409] Site-Directed Polypeptide

[0410] As noted above, a guide RNA and a variant Cas9 site-directed polypeptide form a complex. The guide RNA provides target specificity to the complex by comprising a nucleotide sequence that is complementary to a sequence of a target DNA. The variant Cas9 site-directed polypeptide has reduced endodeoxyribonuclease activity. For example, a variant Cas9 site-directed polypeptide suitable for use in a transcription modulation method of the present disclosure exhibits less than about 20%, less than about 15%, less than about 10%, less than about 5%, less than about 1%, or less than about 0.1%, of the endodeoxyribonuclease activity of a wild-type Cas9 polypeptide, e.g., a wild-type Cas9 polypeptide comprising an amino acid sequence set out in SEQ ID NO:8. In some embodiments, the variant Cas9 site-directed polypeptide has substantially no detectable endodeoxyribonuclease activity. In some embodiments when a site-directed polypeptide has reduced catalytic activity (e.g., when a SEQ ID NO: 8 S. pyogenes Cas9 protein has a D10, G12, G17, E762, H840, N863, H982, H983, A984, D986, and/or a A987 mutation, e.g., D10A, G12A, G17A, E762A, H840A, N863A, H982A, H983A, A984A, and/or D986A), the polypeptide can still bind to target DNA in a site-specific manner (because it is still guided to a target DNA sequence by a guide RNA) as long as it retains the ability to interact with the guide RNA.

[0411] In some cases, a suitable variant Cas9 site-directed polypeptide comprises an amino acid sequence having at least about 75%, at least about 80%, at least about 85%, at least about 90%, at least about 95%, at least about 99% or 100% amino acid sequence identity to amino acids 7-166 and/or 731-1003 of SEQ ID NO: 8, or to the corresponding portions in any one of the amino acid sequences SEQ ID NOs: 1-800.

[0412] In some cases, the variant Cas9 site-directed polypeptide is a nickase that can cleave the complementary strand of the target DNA but has reduced ability to cleave the non-complementary strand of the target DNA. For example, the variant Cas9 site-directed polypeptide can have a mutation (amino acid substitution) that reduces the function of the RuvC domain. As a non-limiting example, in some cases, the variant Cas9 site-directed polypeptide is a D10A (aspartate to alanine) mutation of SEQ ID NO: 8 (or the corresponding mutation of any of the amino acid sequences set forth in SEQ ID NOs: 1-800).

[0413] In some cases, the variant Cas9 site-directed polypeptide in a nickase that can cleave the non-complementary strand of the target DNA but has reduced ability to cleave the complementary strand of the target DNA. For example, the variant Cas9 site-directed polypeptide can have a mutation (amino acid substitution) that reduces the function of the HNH domain (RuvC/HNH/RuvC domain motifs, “domain 2”). As a non-limiting example, in some cases, the variant Cas9 site-directed polypeptide is a H840A (histidine to alanine at amino acid position 840 of SEQ ID NO:8) or the corresponding mutation of any of the amino acid sequences set forth in SEQ ID NOs: 1-800).

[0414] In some cases, the variant Cas9 site-directed polypeptide has a reduced ability to cleave both the complementary and the non-complementary strands of the target DNA. As a non-limiting example, in some cases, the variant Cas9 site-directed polypeptide harbors both D10A and H840A mutations of SEQ ID NO: 8 (or the corresponding mutations of any of the amino acid sequences set forth in SEQ ID NOs: 1-800). Other residues can be mutated to achieve the same effect (i.e. inactivate one or the other nuclease portions). As non-limiting examples, S. pyogenes Cas9 residues D10, G12, G17, E762, H840, N863, H982, H983, A984, D986, and/or A987 of SEQ ID NO: 8 (or the corresponding mutations of any of the proteins set forth as SEQ ID NOs: 1-800) can be altered (i.e., substituted) (see Table 1 for examples of the conservation of Cas9 amino acid residues). Also, mutations other than alanine substitutions are contemplated.

[0415] In some embodiments, a variant Cas9 endonuclease comprises one or more mutations corresponding to a S. pyogenes Cas9 mutation E762A, HH983AA or D986A in SEQ ID NO: 8. In some embodiments, the modified Cas 9 endonuclease further comprises one or more mutations corresponding to a S. pyogenes Cas9 mutation D10A, H840A, G12A, G17A, N854A, N863A, N982A or A984A in SEQ ID NO: 8.

[0416] In some cases, the variant Cas9 site-directed polypeptide is a fusion polypeptide (a “variant Cas9 fusion polypeptide”), i.e., a fusion polypeptide comprising: i) a variant Cas9 site-directed polypeptide; and ii) a covalently linked heterologous polypeptide (also referred to as a “fusion partner”).

[0417] The heterologous polypeptide may exhibit an activity (e.g., enzymatic activity) that will also be exhibited by the variant Cas9 fusion polypeptide (e.g., methyltransferase activity, acetyltransferase activity, kinase activity, ubiquitinating activity, etc.). A heterologous nucleic acid sequence may be linked to another nucleic acid sequence (e.g., by genetic engineering) to generate a chimeric nucleotide sequence encoding a chimeric polypeptide. In some embodiments, a variant Cas9 fusion polypeptide is generated by fusing a variant Cas9 polypeptide with a heterologous sequence that provides for subcellular localization (i.e., the heterologous sequence is a subcellular localization sequence, e.g., a nuclear localization signal (NLS) for targeting to the nucleus; a mitochondrial localization signal for targeting to the mitochondria; a chloroplast localization signal for targeting to a chloroplast; an ER retention signal; and the like). In some embodiments, the heterologous sequence can provide a tag (i.e., the heterologous sequence is a detectable label) for ease of tracking and/or purification (e.g., a fluorescent protein, e.g., green fluorescent protein (GFP), YFP, RFP, CFP, mCherry, tdTomato, and the like; a histidine tag, e.g., a 6×His tag; a hemagglutinin (HA) tag; a FLAG tag; a Myc tag; and the like). In some embodiments, the heterologous sequence can provide for increased or decreased stability (i.e., the heterologous sequence is a stability control peptide, e.g., a degron, which in some cases is controllable (e.g., a temperature sensitive or drug controllable degron sequence, see below). In some embodiments, the heterologous sequence can provide for increased or decreased transcription from the target DNA (i.e., the heterologous sequence is a transcription modulation sequence, e.g., a transcription factor/activator or a fragment thereof, a protein or fragment thereof that recruits a transcription factor/activator, a transcription repressor or a fragment thereof, a protein or fragment thereof that recruits a transcription repressor, a small molecule/drug-responsive transcription regulator, etc.). In some embodiments, the heterologous sequence can provide a binding domain (i.e., the heterologous sequence is a protein binding sequence, e.g., to provide the ability of a chimeric dCas9 polypeptide to bind to another protein of interest, e.g., a DNA or histone modifying protein, a transcription factor or transcription repressor, a recruiting protein, etc.).

[0418] Suitable fusion partners that provide for increased or decreased stability include, but are not limited to degron sequences. Degrons are readily understood by one of ordinary skill in the art to be amino acid sequences that control the stability of the protein of which they are part. For example, the stability of a protein comprising a degron sequence is controlled at least in part by the degron sequence. In some cases, a suitable degron is constitutive such that the degron exerts its influence on protein stability independent of experimental control (i.e., the degron is not drug inducible, temperature inducible, etc.) In some cases, the degron provides the variant Cas9 polypeptide with controllable stability such that the variant Cas9 polypeptide can be turned “on” (i.e., stable) or “off” (i.e., unstable, degraded) depending on the desired conditions. For example, if the degron is a temperature sensitive degron, the variant Cas9 polypeptide may be functional (i.e., “on”, stable) below a threshold temperature (e.g., 42° C., 41° C., 40° C., 39° C., 38° C., 37° C., 36° C., 35° C., 34° C., 33° C., 32° C., 31° C., 30° C., etc.) but non-functional (i.e., “off”, degraded) above the threshold temperature. As another example, if the degron is a drug inducible degron, the presence or absence of drug can switch the protein from an “off” (i.e., unstable) state to an “on” (i.e., stable) state or vice versa. An exemplary drug inducible degron is derived from the FKBP12 protein. The stability of the degron is controlled by the presence or absence of a small molecule that binds to the degron.

[0419] Examples of suitable degrons include, but are not limited to those degrons controlled by Shield-1, DHFR, auxins, and/or temperature. Non-limiting examples of suitable degrons are known in the art (e.g., Dohmen et al., Science, 1994. 263(5151): p. 1273-1276: Heat-inducible degron: a method for constructing temperature-sensitive mutants; Schoeber et al., Am J Physiol Renal Physiol. 2009 January; 296(1):F204-11: Conditional fast expression and function of multimeric TRPV5 channels using Shield-1; Chu et al., Bioorg Med Chem Lett. 2008 November 15; 18(22):5941-4: Recent progress with FKBP-derived destabilizing domains; Kanemaki, Pflugers Arch. 2012 December 28: Frontiers of protein expression control with conditional degrons; Yang et al., Mol Cell. 2012 November 30; 48(4):487-8: Titivated for destruction: the methyl degron; Barbour et al., Biosci Rep. 2013 January 18; 33(1).: Characterization of the bipartite degron that regulates ubiquitin-independent degradation of thymidylate synthase; and Greussing et al., J Vis Exp. 2012 November 10; (69): Monitoring of ubiquitin-proteasome activity in living cells using a Degron (dgn)-destabilized green fluorescent protein (GFP)-based reporter protein; all of which are hereby incorporated in their entirety by reference).

[0420] Exemplary degron sequences have been well-characterized and tested in both cells and animals. Thus, fusing Cas9 to a degron sequence produces a “tunable” and “inducible” Cas9 polypeptide. Any of the fusion partners described herein can be used in any desirable combination. As one non-limiting example to illustrate this point, a Cas9 fusion protein can comprise a YFP sequence for detection, a degron sequence for stability, and transcription activator sequence to increase transcription of the target DNA. Furthermore, the number of fusion partners that can be used in a Cas9 fusion protein is unlimited. In some cases, a Cas9 fusion protein comprises one or more (e.g. two or more, three or more, four or more, or five or more) heterologous sequences.

[0421] Suitable fusion partners include, but are not limited to, a polypeptide that provides for methyltransferase activity, demethylase activity, acetyltransferase activity, deacetylase activity, kinase activity, phosphatase activity, ubiquitin ligase activity, deubiquitinating activity, adenylation activity, deadenylation activity, SUMOylating activity, deSUMOylating activity, ribosylation activity, deribosylation activity, myristoylation activity, or demyristoylation activity, any of which can be directed at modifying the DNA directly (e.g., methylation of DNA) or at modifying a DNA-associated polypeptide (e.g., a histone or DNA binding protein). Further suitable fusion partners include, but are not limited to boundary elements (e.g., CTCF), proteins and fragments thereof that provide periphery recruitment (e.g., Lamin A, Lamin B, etc.), and protein docking elements (e.g., FKBP/FRB, Pil 1/Aby 1, etc.).

[0422] In some embodiments, a site-directed modifying polypeptide can be codon-optimized. This type of optimization is known in the art and entails the mutation of foreign-derived DNA to mimic the codon preferences of the intended host organism or cell while encoding the same protein. Thus, the codons are changed, but the encoded protein remains unchanged. For example, if the intended target cell was a human cell, a human codon-optimized dCas9 (or dCas9 variant) would be a suitable site-directed modifying polypeptide. As another non-limiting example, if the intended host cell were a mouse cell, than a mouse codon-optimized Cas9 (or variant, e.g., enzymatically inactive variant) would be a suitable Cas9 site-directed polypeptide. While codon optimization is not required, it is acceptable and may be preferable in certain cases.

[0423] Polyadenylation signals can also be chosen to optimize expression in the intended host.

[0424] Host Cells

[0425] A method of the present disclosure to modulate transcription may be employed to induce transcriptional modulation in mitotic or post-mitotic cells in vivo and/or ex vivo and/or in vitro. Because the guide RNA provides specificity by hybridizing to target DNA, a mitotic and/or post-mitotic cell can be any of a variety of host cell, where suitable host cells include, but are not limited to, a bacterial cell; an archaeal cell; a single-celled eukaryotic organism; a plant cell; an algal cell, e.g., Botryococcus braunii, Chlamydomonas reinhardtii, Nannochloropsis gaditana, Chlorella pyrenoidosa, Sargassum patens, C. agardh, and the like; a fungal cell; an animal cell; a cell from an invertebrate animal (e.g., an insect, a cnidarian, an echinoderm, a nematode, etc.); a eukaryotic parasite (e.g., a malarial parasite, e.g., Plasmodium fakiparum; a helminth; etc.); a cell from a vertebrate animal (e.g., fish, amphibian, reptile, bird, mammal); a mammalian cell, e.g., a rodent cell, a human cell, a non-human primate cell, etc. Suitable host cells include naturally-occurring cells; genetically modified cells (e.g., cells genetically modified in a laboratory, e.g., by the “hand of man”); and cells manipulated in vitro in any way. In some cases, a host cell is isolated.

[0426] Any type of cell may be of interest (e.g. a stem cell, e.g. an embryonic stem (ES) cell, an induced pluripotent stem (iPS) cell, a germ cell; a somatic cell, e.g. a fibroblast, a hematopoietic cell, a neuron, a muscle cell, a bone cell, a hepatocyte, a pancreatic cell; an in vitro or in vivo embryonic cell of an embryo at any stage, e.g., a 1-cell, 2-cell, 4-cell, 8-cell, etc. stage zebrafish embryo; etc.). Cells may be from established cell lines or they may be primary cells, where “primary cells”, “primary cell lines”, and “primary cultures” are used interchangeably herein to refer to cells and cells cultures that have been derived from a subject and allowed to grow in vitro for a limited number of passages, i.e. splittings, of the culture. For example, primary cultures include cultures that may have been passaged 0 times, 1 time, 2 times, 4 times, 5 times, 10 times, or 15 times, but not enough times go through the crisis stage. Primary cell lines can be are maintained for fewer than 10 passages in vitro. Target cells are in many embodiments unicellular organisms, or are grown in culture.

[0427] If the cells are primary cells, such cells may be harvest from an individual by any convenient method. For example, leukocytes may be conveniently harvested by apheresis, leukocytapheresis, density gradient separation, etc., while cells from tissues such as skin, muscle, bone marrow, spleen, liver, pancreas, lung, intestine, stomach, etc. are most conveniently harvested by biopsy. An appropriate solution may be used for dispersion or suspension of the harvested cells. Such solution will generally be a balanced salt solution, e.g. normal saline, phosphate-buffered saline (PBS), Hank's balanced salt solution, etc., conveniently supplemented with fetal calf serum or other naturally occurring factors, in conjunction with an acceptable buffer at low concentration, e.g., from 5-25 mM. Convenient buffers include HEPES, phosphate buffers, lactate buffers, etc. The cells may be used immediately, or they may be stored, frozen, for long periods of time, being thawed and capable of being reused. In such cases, the cells will usually be frozen in 10% dimethyl sulfoxide (DMSO), 50% serum, 40% buffered medium, or some other such solution as is commonly used in the art to preserve cells at such freezing temperatures, and thawed in a manner as commonly known in the art for thawing frozen cultured cells.

[0428] Introducing Nucleic Acid into a Host Cell

[0429] A guide RNA, or a nucleic acid comprising a nucleotide sequence encoding same, can be introduced into a host cell by any of a variety of well-known methods. Similarly, where a method involves introducing into a host cell a nucleic acid comprising a nucleotide sequence encoding a variant Cas9 site-directed polypeptide, such a nucleic acid can be introduced into a host cell by any of a variety of well-known methods.

[0430] Methods of introducing a nucleic acid into a host cell are known in the art, and any known method can be used to introduce a nucleic acid (e.g., an expression construct) into a stem cell or progenitor cell. Suitable methods include, include e.g., viral or bacteriophage infection, transfection, conjugation, protoplast fusion, lipofection, electroporation, calcium phosphate precipitation, polyethyleneimine (PEI)-mediated transfection, DEAE-dextran mediated transfection, liposome-mediated transfection, particle gun technology, calcium phosphate precipitation, direct micro injection, nanoparticle-mediated nucleic acid delivery (see, e.g., Panyam et., al Adv Drug Deliv Rev. 2012 Sep. 13. pii: 50169-409X(12)00283-9. doi: 10.1016/j.addr.2012.09.023), and the like.

[0431] Nucleic Acids

[0432] The present disclosure provides an isolated nucleic acid comprising a nucleotide sequence encoding a guide RNA. In some cases, a nucleic acid also comprises a nucleotide sequence encoding a variant Cas9 site-directed polypeptide.

[0433] In some embodiments, a method involves introducing into a host cell (or a population of host cells) one or more nucleic acids comprising nucleotide sequences encoding a guide RNA and/or a variant Cas9 site-directed polypeptide. In some embodiments a cell comprising a target DNA is in vitro. In some embodiments a cell comprising a target DNA is in vivo. Suitable nucleic acids comprising nucleotide sequences encoding a guide RNA and/or a site-directed polypeptide include expression vectors, where an expression vector comprising a nucleotide sequence encoding a guide RNA and/or a site-directed polypeptide is a “recombinant expression vector.”

[0434] In some embodiments, the recombinant expression vector is a viral construct, e.g., a recombinant adeno-associated virus construct (see, e.g., U.S. Pat. No. 7,078,387), a recombinant adenoviral construct, a recombinant lentiviral construct, a recombinant retroviral construct, etc. Suitable expression vectors include, but are not limited to, viral vectors (e.g. viral vectors based on vaccinia virus; poliovirus; adenovirus (see, e.g., Li et al., Invest Opthalmol Vis Sci 35:2543 2549, 1994; Borras et al., Gene Ther 6:515 524, 1999; Li and Davidson, PNAS 92:7700 7704, 1995; Sakamoto et al., H Gene Ther 5:1088 1097, 1999; WO 94/12649, WO 93/03769; WO 93/19191; WO 94/28938; WO 95/11984 and WO 95/00655); adeno-associated virus (see, e.g., Ali et al., Hum Gene Ther 9:81 86, 1998, Flannery et al., PNAS 94:6916 6921, 1997; Bennett et al., Invest Opthalmol Vis Sci 38:2857 2863, 1997; Jomary et al., Gene Ther 4:683-690, 1997, Rolling et al., Hum Gene Ther 10:641 648, 1999; Ali et al., Hum Mol Genet 5:591 594, 1996; Srivastava in WO 93/09239, Samulski et al., J. Vir. (1989) 63:3822-3828; Mendelson et al., Virol. (1988) 166:154-165; and Flotte et al., PNAS (1993) 90:10613-10617); SV40; herpes simplex virus; human immunodeficiency virus (see, e.g., Miyoshi et al., PNAS 94:10319 23, 1997; Takahashi et al., J Virol 73:7812 7816, 1999); a retroviral vector (e.g., Murine Leukemia Virus, spleen necrosis virus, and vectors derived from retroviruses such as Rous Sarcoma Virus, Harvey Sarcoma Virus, avian leukosis virus, a lentivirus, human immunodeficiency virus, myeloproliferative sarcoma virus, and mammary tumor virus); and the like.

[0435] Numerous suitable expression vectors are known to those of skill in the art, and many are commercially available. The following vectors are provided by way of example; for eukaryotic host cells: pXT1, pSG5 (Stratagene), pSVK3, pBPV, pMSG, and pSVLSV40 (Pharmacia). However, any other vector may be used so long as it is compatible with the host cell.

[0436] Depending on the host/vector system utilized, any of a number of suitable transcription and translation control elements, including constitutive and inducible promoters, transcription enhancer elements, transcription terminators, etc. may be used in the expression vector (see e.g., Bitter et al. (1987) Methods in Enzymology, 153:516-544).

[0437] In some embodiments, a nucleotide sequence encoding a guide RNA and/or a variant Cas9 site-directed polypeptide is operably linked to a control element, e.g., a transcriptional control element, such as a promoter. The transcriptional control element may be functional in either a eukaryotic cell, e.g., a mammalian cell; or a prokaryotic cell (e.g., bacterial or archaeal cell). In some embodiments, a nucleotide sequence encoding a guide RNA and/or a variant Cas9 site-directed polypeptide is operably linked to multiple control elements that allow expression of the nucleotide sequence encoding a guide RNA and/or a variant Cas9 site-directed polypeptide in both prokaryotic and eukaryotic cells.

[0438] A promoter can be a constitutively active promoter (i.e., a promoter that is constitutively in an active/“ON” state), it may be an inducible promoter (i.e., a promoter whose state, active/“ON” or inactive/“OFF”, is controlled by an external stimulus, e.g., the presence of a particular temperature, compound, or protein.), it may be a spatially restricted promoter (i.e., transcriptional control element, enhancer, etc.)(e.g., tissue specific promoter, cell type specific promoter, etc.), and it may be a temporally restricted promoter (i.e., the promoter is in the “ON” state or “OFF” state during specific stages of embryonic development or during specific stages of a biological process, e.g., hair follicle cycle in mice).

[0439] Suitable promoters can be derived from viruses and can therefore be referred to as viral promoters, or they can be derived from any organism, including prokaryotic or eukaryotic organisms. Suitable promoters can be used to drive expression by any RNA polymerase (e.g., pol I, pol II, pol III). Exemplary promoters include, but are not limited to the SV40 early promoter, mouse mammary tumor virus long terminal repeat (LTR) promoter; adenovirus major late promoter (Ad MLP); a herpes simplex virus (HSV) promoter, a cytomegalovirus (CMV) promoter such as the CMV immediate early promoter region (CMVIE), a rous sarcoma virus (RSV) promoter, a human U6 small nuclear promoter (U6) (Miyagishi et al., Nature Biotechnology 20, 497-500 (2002)), an enhanced U6 promoter (e.g., Xia et al., Nucleic Acids Res. 2003 Sep. 1; 31(17)), a human H1 promoter (H1), and the like.

[0440] Examples of inducible promoters include, but are not limited to T7 RNA polymerase promoter, T3 RNA polymerase promoter, Isopropyl-beta-D-thiogalactopyranoside (IPTG)-regulated promoter, lactose induced promoter, heat shock promoter, Tetracycline-regulated promoter (e.g., Tet-ON, Tet-OFF, etc.), Steroid-regulated promoter, Metal-regulated promoter, estrogen receptor-regulated promoter, etc. Inducible promoters can therefore be regulated by molecules including, but not limited to, doxycycline; RNA polymerase, e.g., T7 RNA polymerase; an estrogen receptor; an estrogen receptor fusion; etc.

[0441] In some embodiments, the promoter is a spatially restricted promoter (i.e., cell type specific promoter, tissue specific promoter, etc.) such that in a multi-cellular organism, the promoter is active (i.e., “ON”) in a subset of specific cells. Spatially restricted promoters may also be referred to as enhancers, transcriptional control elements, control sequences, etc. Any convenient spatially restricted promoter may be used and the choice of suitable promoter (e.g., a brain specific promoter, a promoter that drives expression in a subset of neurons, a promoter that drives expression in the germline, a promoter that drives expression in the lungs, a promoter that drives expression in muscles, a promoter that drives expression in islet cells of the pancreas, etc.) will depend on the organism. For example, various spatially restricted promoters are known for plants, flies, worms, mammals, mice, etc. Thus, a spatially restricted promoter can be used to regulate the expression of a nucleic acid encoding a site-directed polypeptide in a wide variety of different tissues and cell types, depending on the organism. Some spatially restricted promoters are also temporally restricted such that the promoter is in the “ON” state or “OFF” state during specific stages of embryonic development or during specific stages of a biological process (e.g., hair follicle cycle in mice).

[0442] For illustration purposes, examples of spatially restricted promoters include, but are not limited to, neuron-specific promoters, adipocyte-specific promoters, cardiomyocyte-specific promoters, smooth muscle-specific promoters, photoreceptor-specific promoters, etc. Neuron-specific spatially restricted promoters include, but are not limited to, a neuron-specific enolase (NSE) promoter (see, e.g., EMBL HSENO2, X51956); an aromatic amino acid decarboxylase (AADC) promoter; a neurofilament promoter (see, e.g., GenBank HUMNFL, L04147); a synapsin promoter (see, e.g., GenBank HUMSYNIB, M55301); a thy-1 promoter (see, e.g., Chen et al. (1987) Cell 51:7-19; and Llewellyn, et al. (2010) Nat. Med. 16(10):1161-1166); a serotonin receptor promoter (see, e.g., GenBank S62283); a tyrosine hydroxylase promoter (TH) (see, e.g., Oh et al. (2009) Gene Ther 16:437; Sasaoka et al. (1992) Mol. Brain Res. 16:274; Boundy et al. (1998) J. Neurosci. 18:9989; and Kaneda et al. (1991) Neuron 6:583-594); a GnRH promoter (see, e.g., Radovick et al. (1991) Proc. Natl. Acad. Sci. USA 88:3402-3406); an L7 promoter (see, e.g., Oberdick et al. (1990) Science 248:223-226); a DNMT promoter (see, e.g., Bartge et al. (1988) Proc. Natl. Acad. Sci. USA 85:3648-3652); an enkephalin promoter (see, e.g., Comb et al. (1988) EMBO J. 17:3793-3805); a myelin basic protein (MBP) promoter; a Ca²⁺-calmodulin-dependent protein kinase II-alpha (CamKIIa) promoter (see, e.g., Mayford et al. (1996) Proc. Natl. Acad. Sci. USA 93:13250; and Casanova et al. (2001) Genesis 31:37); a CMV enhancer/platelet-derived growth factor-0 promoter (see, e.g., Liu et al. (2004) Gene Therapy 11:52-60); and the like.

[0443] Adipocyte-specific spatially restricted promoters include, but are not limited to aP2 gene promoter/enhancer, e.g., a region from −5.4 kb to +21 bp of a human aP2 gene (see, e.g., Tozzo et al. (1997) Endocrinol. 138:1604; Ross et al. (1990) Proc. Natl. Acad. Sci. USA 87:9590; and Pavjani et al. (2005) Nat. Med. 11:797); a glucose transporter-4 (GLUT4) promoter (see, e.g., Knight et al. (2003) Proc. Natl. Acad. Sci. USA 100:14725); a fatty acid translocase (FAT/CD36) promoter (see, e.g., Kuriki et al. (2002) Biol. Pharm. Bull. 25:1476; and Sato et al. (2002) J. Biol. Chem. 277:15703); a stearoyl-CoA desaturase-1 (SCD1) promoter (Tabor et al. (1999) J. Biol. Chem. 274:20603); a leptin promoter (see, e.g., Mason et al. (1998) Endocrinol. 139:1013; and Chen et al. (1999) Biochem. Biophys. Res. Comm. 262:187); an adiponectin promoter (see, e.g., Kita et al. (2005) Biochem. Biophys. Res. Comm. 331:484; and Chakrabarti (2010) Endocrinol. 151:2408); an adipsin promoter (see, e.g., Platt et al. (1989) Proc. Natl. Acad. Sci. USA 86:7490); a resistin promoter (see, e.g., Seo et al. (2003) Molec. Endocrinol. 17:1522); and the like.

[0444] Cardiomyocyte-specific spatially restricted promoters include, but are not limited to control sequences derived from the following genes: myosin light chain-2, a-myosin heavy chain, AE3, cardiac troponin C, cardiac actin, and the like. Franz et al. (1997) Cardiovasc. Res. 35:560-566; Robbins et al. (1995) Ann. N.Y. Acad. Sci. 752:492-505; Linn et al. (1995) Circ. Res. 76:584591; Parmacek et al. (1994) Mol. Cell. Biol. 14:1870-1885; Hunter et al. (1993) Hypertension 22:608-617; and Sartorelli et al. (1992) Proc. Natl. Acad. Sci. USA 89:4047-4051.

[0445] Smooth muscle-specific spatially restricted promoters include, but are not limited to an SM22a promoter (see, e.g., Akyilrek et al. (2000) Mol. Med. 6:983; and U.S. Pat. No. 7,169,874); a smoothelin promoter (see, e.g., WO 2001/018048); an a-smooth muscle actin promoter; and the like. For example, a 0.4 kb region of the SM22a promoter, within which lie two CArG elements, has been shown to mediate vascular smooth muscle cell-specific expression (see, e.g., Kim, et al. (1997) Mol. Cell. Biol. 17, 2266-2278; Li, et al., (1996) J. Cell Biol. 132, 849-859; and Moessler, et al. (1996) Development 122, 2415-2425).

[0446] Photoreceptor-specific spatially restricted promoters include, but are not limited to, a rhodopsin promoter; a rhodopsin kinase promoter (Young et al. (2003) Ophthalmol. Vis. Sci. 44:4076); a beta phosphodiesterase gene promoter (Nicoud et al. (2007) J. Gene Med. 9:1015); a retinitis pigmentosa gene promoter (Nicoud et al. (2007) supra); an interphotoreceptor retinoid-binding protein (IRBP) gene enhancer (Nicoud et al. (2007) supra); an IRBP gene promoter (Yokoyama et al. (1992) Exp Eye Res. 55:225); and the like.

[0447] Libraries

[0448] The present disclosure provides a library of guide RNAs. The present disclosure provides a library of nucleic acids comprising nucleotides encoding guide RNAs. A library of nucleic acids comprising nucleotides encoding guide RNAs can comprises a library of recombinant expression vectors comprising nucleotides encoding the guide RNAs.

[0449] A library can comprise from about 10 individual members to about 10¹² individual members; e.g., a library can comprise from about 10 individual members to about 10² individual members, from about 10² individual members to about 10³ individual members, from about 10³ individual members to about 10⁵ individual members, from about 10⁵ individual members to about 10⁷ individual members, from about 10⁷ individual members to about 10⁹ individual members, or from about 10⁹ individual members to about 10¹² individual members.

[0450] An “individual member” of a library differs from other members of the library in the nucleotide sequence of the DNA targeting segment of the guide RNA. Thus, e.g., each individual member of a library can comprise the same or substantially the same nucleotide sequence of the protein-binding segment as all other members of the library; and can comprise the same or substantially the same nucleotide sequence of the transcriptional termination segment as all other members of the library; but differs from other members of the library in the nucleotide sequence of the DNA targeting segment of the guide RNA. In this way, the library can comprise members that bind to different target nucleic acids.

[0451] Uses

[0452] A method for modulating transcription according to the present disclosure finds use in a variety of applications, which are also provided. Applications include research applications; diagnostic applications; industrial applications; and treatment applications.

[0453] Research applications include, e.g., determining the effect of reducing or increasing transcription of a target nucleic acid on, e.g., development, metabolism, expression of a downstream gene, and the like.

[0454] High through-put genomic analysis can be carried out using a transcription modulation method, in which only the DNA-targeting segment of the guide RNA needs to be varied, while the protein-binding segment and the transcription termination segment can (in some cases) be held constant. A library (e.g., a library) comprising a plurality of nucleic acids used in the genomic analysis would include: a promoter operably linked to a guide RNA-encoding nucleotide sequence, where each nucleic acid would include a different DNA-targeting segment, a common protein-binding segment, and a common transcription termination segment. A chip could contain over 5×10⁴ unique guide RNAs. Applications would include large-scale phenotyping, gene-to-function mapping, and meta-genomic analysis.

[0455] The methods disclosed herein find use in the field of metabolic engineering. Because transcription levels can be efficiently and predictably controlled by designing an appropriate guide RNA, as disclosed herein, the activity of metabolic pathways (e.g., biosynthetic pathways) can be precisely controlled and tuned by controlling the level of specific enzymes (e.g., via increased or decreased transcription) within a metabolic pathway of interest. Metabolic pathways of interest include those used for chemical (fine chemicals, fuel, antibiotics, toxins, agonists, antagonists, etc.) and/or drug production.

[0456] Biosynthetic pathways of interest include but are not limited to (1) the mevalonate pathway (e.g., HMG-CoA reductase pathway) (converts acetyl-CoA to dimethylallyl pyrophosphate (DMAPP) and isopentenyl pyrophosphate (IPP), which are used for the biosynthesis of a wide variety of biomolecules including terpenoids/isoprenoids), (2) the non-mevalonate pathway (i.e., the “2-C-methyl-D-erythritol 4-phosphate/1-deoxy-D-xylulose 5-phosphate pathway” or “MEP/DOXP pathway” or “DXP pathway”)(also produces DMAPP and IPP, instead by converting pyruvate and glyceraldehyde 3-phosphate into DMAPP and IPP via an alternative pathway to the mevalonate pathway), (3) the polyketide synthesis pathway (produces a variety of polyketides via a variety of polyketide synthase enzymes. Polyketides include naturally occurring small molecules used for chemotherapy (e. g., tetracyclin, and macrolides) and industrially important polyketides include rapamycin (immunosuppressant), erythromycin (antibiotic), lovastatin (anticholesterol drug), and epothilone B (anticancer drug)), (4) fatty acid synthesis pathways, (5) the DAHP (3-deoxy-D-arabino-heptulosonate 7-phosphate) synthesis pathway, (6) pathways that produce potential biofuels (such as short-chain alcohols and alkane, fatty acid methyl esters and fatty alcohols, isoprenoids, etc.), etc.

[0457] Networks and Cascades

[0458] The methods disclosed herein can be used to design integrated networks (i.e., a cascade or cascades) of control. For example, a guide RNA/variant Cas9 site-directed polypeptide may be used to control (i.e., modulate, e.g., increase, decrease) the expression of another DNA-targeting RNA or another variant Cas9 site-directed polypeptide. For example, a first guide RNA may be designed to target the modulation of transcription of a second chimeric dCas9 polypeptide with a function that is different than the first variant Cas9 site-directed polypeptide (e.g., methyltransferase activity, demethylase activity, acetyltransferase activity, deacetylase activity, etc.). In addition, because different dCas9 proteins (e.g., derived from different species) may require a different Cas9 handle (i.e., protein binding segment), the second chimeric dCas9 polypeptide can be derived from a different species than the first dCas9 polypeptide above. Thus, in some cases, the second chimeric dCas9 polypeptide can be selected such that it may not interact with the first guide RNA. In other cases, the second chimeric dCas9 polypeptide can be selected such that it does interact with the first guide RNA. In some such cases, the activities of the two (or more) dCas9 proteins may compete (e.g., if the polypeptides have opposing activities) or may synergize (e.g., if the polypeptides have similar or synergistic activities). Likewise, as noted above, any of the complexes (i.e., guide RNA/dCas9 polypeptide) in the network can be designed to control other guide RNAs or dCas9 polypeptides. Because a guide RNA and variant Cas9 site-directed polypeptide can be targeted to any desired DNA sequence, the methods described herein can be used to control and regulate the expression of any desired target. The integrated networks (i.e., cascades of interactions) that can be designed range from very simple to very complex, and are without limit.

[0459] In a network wherein two or more components (e.g., guide RNAs, activator-RNAs, targeter-RNAs, or dCas9 polypeptides) are each under regulatory control of another guide RNA/dCas9 polypeptide complex, the level of expression of one component of the network may affect the level of expression (e.g., may increase or decrease the expression) of another component of the network. Through this mechanism, the expression of one component may affect the expression of a different component in the same network, and the network may include a mix of components that increase the expression of other components, as well as components that decrease the expression of other components. As would be readily understood by one of skill in the art, the above examples whereby the level of expression of one component may affect the level of expression of one or more different component(s) are for illustrative purposes, and are not limiting. An additional layer of complexity may be optionally introduced into a network when one or more components are modified (as described above) to be manipulable (i.e., under experimental control, e.g., temperature control; drug control, i.e., drug inducible control; light control; etc.).

[0460] As one non-limiting example, a first guide RNA can bind to the promoter of a second guide RNA, which controls the expression of a target therapeutic/metabolic gene. In such a case, conditional expression of the first guide RNA indirectly activates the therapeutic/metabolic gene. RNA cascades of this type are useful, for example, for easily converting a repressor into an activator, and can be used to control the logics or dynamics of expression of a target gene.

[0461] A transcription modulation method can also be used for drug discovery and target validation.

### EXAMPLES

[0462] Various aspects of the invention make use of the following materials and methods and are illustrated by the following non-limiting examples, wherein Example 1 relates to Cas9 orthologs, Example 2 elates to exchangeability of bacterial RNase III enzymes, Example 3 relates to the Cas9 HNH and RuvC domains, Example 4 relates to exchangeability of Cas9 endonucleases in tracrRNA-directed pre-crRNA maturation by RNase III, Example 5 relates to PAMs of Cas9 orthologs and Example 6 relates to exchangeability of guide RNA and Cas9 endonucleases.

### Materials and Methods

### Bacterial Strains and Culture Conditions

[0463] Supplementary Table S1 lists bacterial strains used in this study. S. pyogenes, Streptococcus mutans, Campylobacter jejuni, N. meningitidis, Escherichia coli and Francisella novicida were grown as previously described (15,16). BHI (Brain Heart Infusion, Becton Dickinson) agar and BHI broth medium supplemented with 1% glucose and 1% lactose were used to culture S. thermophilus at 42° C. in a 5% CO₂ environment (16). Pasteurella multocida and Staphylococcus aureus were grown at 37° C. on BHI agar plates and in BHI broth with shaking. Cell growth was monitored by measuring the optical density of cultures at 620 nm (OD₆₂₀) using a microplate reader (BioTek PowerWave).

[0464] Bacterial Transformation

[0465] E. coli was transformed with plasmid DNA according to standard protocols (35). Transformation of S. pyogenes was performed as previously described (36) with some modifications. S. pyogenes pre-cultures were diluted 1:100 in fresh THY medium and grown at 37° C., 5% CO₂ until OD₆₂₀ reached 0.3. Glycine was added to the medium to 10% final concentration and growth was maintained for an additional hour. Cells were spun down at 4° C. at 2500×g and washed three times with electroporation buffer (5 mM KH₂PO₄, 0.4 M D-sorbitol, 10% glycerol, pH 4.5), finally suspended in the same buffer and equalized to the same OD₆₂₀. For electroporation, 1 μg of plasmid was incubated with the competent cells on ice for 10 min. The conditions were 25 μF, 600Ω and 1.5 V using 1 mm electroporation cuvettes (Biorad). After a regeneration time of 3 h, bacteria were spread on agar medium supplemented with kanamycin (300 μg/ml). Transformation assays were performed at least three times independently with technical triplicates. The efficiencies were calculated as CFU (colony-forming units) per μg of plasmid DNA. Positive and negative control transformations were done with backbone plasmid pEC85 and sterile H₂O, respectively.

[0466] DNA Manipulations

[0467] DNA manipulations including DNA preparation (QIAprep Spin MiniPrep Kit, Qiagen), PCR (Phusion® High-Fidelity DNA Polymerase, Finnzyme), DNA digestion (restriction enzymes, Fermentas). DNA ligation (T4 DNA ligase, Fermentas). DNA purification (QIAquick PCR Purification Kit, Qiagen) and agarose gel electrophoresis were performed according to standard techniques or manufacturers' protocols with some modifications (35). Site-directed mutagenesis was done using QuikChange II XL kit (Stratagene) or PCR-based mutagenesis (37). Synthetic oligonucleotides (Sigma-Aldrich & Biomers) and plasmids used and generated in this study are listed in Supplementary Table S1. The integrity of all constructed plasmids was verified by enzymatic digestion and sequencing at LGC Genomics.

[0468] Construction of Plasmids for Complementation Studies in S. pyogenes

[0469] The backbone shuttle vector pEC85 was used for complementation study (38,39). The RNase-III encoding genes (mc genes) of S. pyogenes, S. mutans, S. thermophilus, C. jejuni, N. meningitidis, P. multocida, F. novicida, E. coli and S. aureus, and the genes encoding truncated and inactive RNase III variants (truncated and inactive (D51A) mc mutants) of S. pyogenes were cloned in pEC483 (pEC85 containing the native promoter of S. pyogenes mc) using NcoI and EcoRI restriction sites (Supplementary Table S1, Supplementary FIG. S6). The ortholog and mutant cas9 genes were cloned in pEC342 (pEC85 containing a sequence encoding tracrRNA-171 nt (16) and the native promoter of the S. pyogenes cas operon) using SalI and SmaI restriction sites (Supplementary Table S1). Note that in a previous study, we observed low abundance of tracrRNA in the cas9 deletion mutant. For this reason, plasmids used in cas9 complementation studies were designed to encode tracrRNA in addition to cas9 (16). The generated mc and cas9 recombinant plasmids were introduced in S. pyogenes Δmc and Δcas9 deletion strains, respectively (Supplementary Table S1). Plasmid integrity in all complemented strains was checked by plasmid DNA extraction and digestion.

[0470] Construction of Plasmids for Transformation Studies in S. pyogenes

[0471] Plasmid pEC85 was used as backbone vector for transformation studies. A DNA fragment containing WT speM protospacer sequence was cloned in the PstI site of plasmids containing coding sequences of WT or mutated cas9 from S. pyogenes (Supplementary Table S1).

[0472] Construction of Plasmids for Protein Purification

[0473] The overexpression vector pET16b (Novagen) was modified by inserting three additional restriction sites (SalI, SacI, NotI) into the NdeI restriction site, generating pEC621. The genes coding for the orthologous Cas9 proteins were PCR amplified from genomic DNA of the corresponding strains using primers containing a SalI and a NotI restriction site (Supplementary Table S1). The S. pyogenes cas9 mutant genes were PCR amplified from the complementation plasmids mentioned above. All orthologous and mutant cas9 genes were cloned into the SalI and NotI sites of pEC621.

[0474] Construction of Substrate Plasmids for In Vitro Cleavage Assays

[0475] Plasmid pEC287 that contains the speM protospacer sequence was used as a vector to construct all substrate plasmids. The PAM sequence located in 3′ just next to the crRNA-targeted sequence of the speM protospacer (GGG on this plasmid) was modified by PCR-mediated site-directed mutagenesis (37) using one standard oligonucleotide (OLEC 3140 or OLEC3194) that either introduced or removed a XbaI restriction site for screening purposes, and a second mutagenic oligonucleotide to exchange the protospacer adjacent sequence (Supplementary Table S1).

[0476] RNA Preparation

[0477] Total RNA from S. pyogenes SF370 WT, deletion mutants and complemented strains was prepared from culture samples collected at the mid-logarithmic phase of growth using TRIzol (Sigma-Aldrich). The total RNA samples were treated with DNase I (Fermentas) according to the manufacturer's instructions. The concentration of RNA in each sample was measured using NanoDrop.

[0478] Northern Blot Analysis

[0479] Northern blot analysis was carried out essentially as described previously (40-42). Total RNA was separated on 10% polyacrylamide 8 M urea gels and further processed for blotting on nylon membranes (Hybond™ N+, GE healthcare; Trans-Blot® SD semi-dry transfer apparatus, Biorad; 1×TBE, 2 h at 10 V/cm), chemical crosslinking with EDC (1-Ethyl-3-(3-dimethylaminopropyl) carbodiimide hydrochloride) (41) and prehybridization (Rapid-hyb buffer, GE healthcare; 1 h at 42° C.). Oligonucleotide probes (40 pmol) were labeled with ³²P (20 μCi) using the T4-polynucleotide kinase (10 U, Fermentas) and purified using G-25 columns (GE Healthcare) prior use. Visualization of the radioactive signal was done using a phosphorimager. 5S rRNA served as loading control.

[0480] Protein Purification

[0481] E. coli Rosetta2(DE3) and E. coli NiCo21(DE3) (New England Biolabs) were transformed with overexpression plasmids coding for S. pyogenes WT and mutant or orthologous Cas9, respectively. Cells were grown at 37° C. to reach an OD₆₀₀ of 0.7-0.8, protein expression was induced by adding IPTG to a final concentration of 0.5 mM and cultures were further grown at 13° C. overnight. The cells were harvested by centrifugation and the pellet was resuspended in lysis-buffer (20 mM HEPES pH 7.5, 500 mM KCl [1 M for S. thermophilus* Cas9], 0.1% Triton X-100, 25 mM imidazole) and lysed by sonication. The lysate was cleared by centrifugation (>20 000×g) and incubated with Ni-NTA (Qiagen) for 1 h at 4° C. After washing the Ni-NTA with lysis-buffer and wash-buffer (20 mM HEPES pH 7.5, 300 mM KCl, 0.1% Triton X-100, 25 mM imidazole), the recombinant protein was eluted with elution-buffer (20 mM HEPES pH 7.5, 150 mM KCl, 0.1 mM DTT, 250 mM imidazole, 1 mM EDTA) and the fractions were analyzed by SDS-PAGE. In the case of S. pyogenes Cas9 WT and mutants, the protein containing eluates were pooled and further purified via HiTrap SP FF (GE Healthcare) cation-exchange chromatography. Briefly, the protein was loaded on the column equilibrated with buffer A (20 mM HEPES pH 7.5, 100 mM KCl) using an FPLC system (Akta, GE Healthcare). Cas9 was eluted with a gradient of buffer B (20 mM HEPES pH 7.5, 1 M KCl) over 12 ml. 1 ml fractions were collected and analyzed by SDS-PAGE. The protein containing fractions were pooled and dialyzed overnight (20 mM HEPES pH 7.5, 150 mM KCl, 50% glycerol). For Cas9 orthologs, the eluates from Ni-NTA purification were checked for purity by SDS-PAGE. In case of contaminants, a second purification over chitin beads was performed as described in the manual for NiCo21(DE3) cells from New England Biolabs. Briefly, 1 ml chitin beads (New England Biolabs) equilibrated with buffer A was incubated with the Ni²⁺-IMAC eluates for 1 h at 4° C. Afterwards the beads were added onto a column and the Cas9 containing flowthroughs were collected and again checked for purity by SDS-PAGE (Supplementary FIG. S1). The purified proteins were dialyzed overnight. The protein concentration was calculated by measuring the OD₂₈₀ using the extinction coefficient. The detailed characteristics of purified proteins are summarized in Supplementary FIG. S1A.

[0482] In Vitro Transcription

[0483] RNA for in vitro DNA cleavage assays was generated by in vitro transcription using the AmpliScribe™ T7-Flash™ Transcription Kit (Epicentre) according to the manufacturer's instructions. PCR products or synthetic oligonucleotides used as templates are listed in Supplementary Table S1. The synthesized tracrRNA and repeat region of crRNA from each bacterial species correspond to the mature forms of RNAs as determined by deep RNA sequencing (15) or bioinformatics predictions. The spacer region of all crRNAs used in this study targets the speM protospacer (encoding superantigen; targeted by spacer 2 of S. pyogenes SF370 CRISPR array, Spyo1h_002 (16)). Transcribed RNAs were precipitated and further purified from 10% polyacrylamide 8 M urea denaturing gel. The RNA concentration was determined by measuring the OD₂₆₀ and the molarity was calculated. Equimolar amounts of crRNA and tracrRNA were mixed in 5×RNA annealing buffer (1 M NaCl, 100 mM HEPES pH 7.5), heated up to 95° C. for 5 min and slowly cooled to room temperature before use.

[0484] In Vitro DNA Cleavage Assays

[0485] For the cleavage assays using Cas9 mutant proteins, 25 nM of Cas9 were incubated with equimolar amounts of prehybridized S. pyogenes dual-RNA in cleavage buffer (20 mM HEPES pH 7.5, 150 mM KCl, 10 mM MgCl₂, 0.5 mM DTT, 0.1 mM EDTA) for 15 min at 37° C. Plasmid DNA (5 nM) containing speM (NGG PAM) was added and further incubated for 1 h at 37° C. The reaction was stopped by addition of 5× loading buffer (250 mM EDTA, 30% glycerol, 1.2% SDS, 0.1% (w/v) bromophenol blue) and analyzed by 1% agarose gel electrophoresis in 1×TAE. Cleavage products were visualized by ethidium bromide staining. All other cleavage assays were carried out using the same conditions with the following modifications: KGB (43) (100 mM potassium glutamate, 25 mM Tris/acetate pH 7.5, 10 mM Mg-acetate, 0.5 mM 2-mercaptoethanol, 10 μg/ml BSA) was used as cleavage buffer and different concentrations of dual-RNA:Cas9 complex were analyzed. The concentration of plasmid DNA was kept constant in all experiments, i.e. 5 nM.

[0486] Search for PAM Motifs

[0487] Spacer sequences of the selected bacterial species were extracted from the CRISPRdatabase (http://crispr.u-psud.fr/crispr/) and used to find cognate protospacer candidates using megaBLAST (http://blast.ncbi.nih.gov/Blast). Protospacer candidates were defined as containing a sequence with ≧90% similarity to the crRNA spacer sequence and originating from phage, plasmid or genomic DNA related to the bacterial species of the targeting CRISPR-Cas. For the investigated CRISPR-Cas loci, the orientation of transcription was determined previously by RNA sequencing or Northern blot analysis (15,16). It was also shown before that in type II CRISPR-Cas, the PAM sequence is located in 3′ of the protospacer, juxtaposed to the sequence targeted by cognate crRNA on the non-target strand (14,18,23,44). To identify possible PAMs in each bacterial species, 10 nt sequences on the non-target strand directly downstream of each protospacer sequence were aligned. A logo plot (http://weblogo.berkeley.edu/) showing the most abundant nucleotides was created and PAM sequences were predicted. In the cases of CRISPR-Cas loci for which no suitable protospacer sequences could be identified (S. mutans UA159, C. jejuni NCTC 11168, P. multocida Pm70, F. novicida U112), closely related strains of the same species were selected (Supplementary Table S2). The spacer contents of the type II CRISPR arrays in selected strains were analyzed (http://crispr.u-psud.fr/Server/). The spacer sequences were then used to select cognate protospacer sequences as described above.

[0488] Protein Sequence Analysis

[0489] Position-Specific Iterated (PSI)-BLAST program (45) was used to retrieve orthologs of the Cas9 family in the NCBI nr database. Sequences shorter than 800 amino acids were discarded. The BLASTClust program (46) set up with a length coverage cutoff of 0.8 and a score coverage threshold (bit score divided by alignment length) of 0.8 was used to cluster the remaining sequences (Supplementary Table S2). This procedure produced 82 clusters. In the case of sequences reported in this study, one or several representatives from each cluster were selected and aligned using the MUSCLE program (47) with default parameters, followed by a manual correction on the basis of local alignments obtained using PSI-BLAST (45) and HHpred programs (48). The confidently aligned blocks (Supplementary FIG. S2) with 285 informative positions were used for maximum likelihood tree reconstruction using the FastTree program (49) with the default parameters: JTT evolutionary model, discrete gamma model with 20 rate categories. The same program was used to calculate the bootstrap values. Cas1 sequences were selected from the corresponding cas operons (Supplementary Table S2). A few incomplete sequences were substituted by other Cas1 sequences from the same Cas9 cluster (Supplementary Table S2). Several Cas1 proteins from subtypes I-A, B, C and E were included as an outgroup. Cas1 sequences were aligned using the same approach described above and 252 informative positions (Supplementary FIG. S3) were used for maximum likelihood tree reconstruction using the FastTree program. RNase III multiple sequence alignment was prepared using the MUSCLE program.

[0490] RNA Sequence and Structure Analysis

[0491] RNA duplex secondary structures were predicted using RNAcofold of the Vienna RNA package (50,51) and RNAhybrid (http://bibiserv.techfak.uni-bielefeld.de/rnahvbrid/). The structure predictions were then visualized using VARNA (52).

Supplementary Table S1. Strains, plasmids and primers used in the study.

| | | |
|---|---|---|
| Strain | Relevant characteristics | Source |

Streptococcus pyogenes

| | | |
|---|---|---|
| WT | | |
| EC904 | SF370 (M1 serotype) (WT) | ATCC 700294 |
| Δcas9 | | |
| EC1788 | EC904Δcas9 | (16) |
| Δrnc | | |
| EC1636 | EC904Δrnc | (16) |

Δcas9 in SF370 + cas9 complementations in trans

| | | |
|---|---|---|
| EC2121 | EC1788 + pEC714 (Pcas9(Spy)-cas9(Spy)-CtHis) | This study |
| EC2127 | EC1788 + pEC710 (171 tracrRNA-Pcas9(Spy)-CtHis) | This study |
| EC2150 | EC1788 + pEC553 (Pcas9(Spy)-cas9-HH983AA(Spy)-CtHis) | This study |
| EC2151 | EC1788 + pEC554 (Pcas9(Spy)-cas9-D10A(Spy)-CtHis) | This study |
| EC2152 | EC1788 + pEC555 (Pcas9(Spy)-cas9-H840A(Spy)-CtHis) | This study |
| EC2153 | EC1788 + pEC556 (Pcas9(Spy)-cas9-N854A(Spy)-CtHis | This study |
| EC2154 | EC1788 + pEC557 (Pcas9(Spy)-cas9-N863A(Spy)-CtHis) | This study |
| EC2155 | EC1788 + pEC558 (Pcas9(Spy)-cas9-D986A(Spy)-CtHis) | This study |
| EC2156 | EC1788 + pEC559 (Pcas9(Spy)-cas9-E762A(Spy)-CtHis) | This study |
| EC2118 | EC1788 + pEC518 (Pcas9(Spy)-cas9(Cje)-CtHis) | This study |
| EC2128 | EC1788 + pEC538 (Pcas9(Spy)-cas9(Fno)-CtHis) | This study |
| EC2199 | EC1788 + pEC544 (Pcas9(Spy)-cas9(Nme)-CtHis) | This study |
| EC2119 | EC1788 + pEC520 (Pcas9(Spy)-cas9(Pmu)-CtHis) | This study |
| EC2111 | EC1788 + pEC519 (Pcas9(Spy)-cas9(Smu)-CtHis) | This study |
| EC2112 | EC1788 + pEC521 (Pcas9(Spy)-cas9(Sth*)-CtHis) | This study |
| EC2120 | EC1788 + pEC522 (Pcas9(Spy)-cas9(Sth**)-CtHis) | This study |

Δrnc in SF370 + rnc complementations in trans

| | | |
|---|---|---|
| EC2076 | EC1636 + pEC484 (Prnc(Spy)-rnc(Spy)) | This study |
| EC2084 | EC1636 + pEC505 (Prnc(Spy)-rnc-catalytically | |
| | inactive(Spy)) | |
| EC2083 | EC1636 + pEC504 (Prnc(Spy)-rnc-RNA binding | This study |
| | inactive(Spy)) | |
| EC2078 | EC1636 + pEC486 (Prnc(Spy)-rnc(Cje)) | This study |
| EC2080 | EC1636 + pEC492 (Prnc(Spy)-rnc(Eco)) | This study |
| EC2126 | EC1636 + pEC537 (Prnc(Spy)-rnc(Fno)) | This study |
| EC2085 | EC1636 + pEC506 (Prnc(Spy)-rnc(Nme)) | This study |
| EC2077 | EC1636 + pEC485 (Prnc(Spy)-rnc(Pmu)) | This study |
| EC2086 | EC1636 + pEC507 (Prnc(Spy)-rnc(Sau)) | This study |
| EC2082 | EC1636 + pEC494 (Prnc(Spy)-rnc(Smu)) | This study |
| EC2131 | EC1636 + pEC534 (Prnc(Spy)-rnc(Sth)) | This study |

Campylobacter jejuni

| | | |
|---|---|---|
| EC437 | NCTC 11168; ATCC 700819 (WT), CIP 107370 | Pasteur Institute |

Francisella novicida

| | | |
|---|---|---|
| EC1041 | U112 (WT) | Anders Sjöstedt |

Neisseria meningitidis

| | | |
|---|---|---|
| EC438 | CIP 107858 | Pasteur Institute |

Pasteurella multocida

| | | |
|---|---|---|
| EC439 | Pm70 (WT), ATCC BAA-1113 | Pasteur Institute |

Staphylococcus aureus

| | | |
|---|---|---|
| EC36 | COL (WT) | Lab strain collection |

Streptocossus mutans

| | | |
|---|---|---|
| EC1293 | UA159 (WT) | (16) |

Streptocossus thermophilus

| | | |
|---|---|---|
| EC810 | LMD-9 (WT) | (16) |

E. coli

| | | |
|---|---|---|
| RDN204 | TOP10, host for cloning | Invitrogen |
| EC1265 | Rosetta | Novagen |

^{a}Cje: Campylobacter jejuni NCTC 11168; Eco: Escherichia coli TOP10; Fno: Francisella novicida
U112; Nme: Neisseria meningitidis A Z2491; Pmu: Pasteurella multocida Pm70; Sau:
Staphylococcus aureus COL; Smu: Streptococcus mutans UA159; Spy: Streptocossus pypgenes
SF370; Sth: Streptococcus thermophilus LMD-9.

| | | |
|---|---|---|
| Plasmid | Relevant characteristics | Source |

Vectors for S. pyogenes

| | | |
|---|---|---|
| pEC85 | repDEG-pAMβ1, pJH1-aphIII, ColE1 | Bernhard Roppenser |

Plasmids for cas9 domain functional and co-evolution analysis in S. pyogenes SF370

| | | |
|---|---|---|
| pEC268 | pEC85Ω171 tracrRNA (171 nt form) | (16) |
| pEC309 | pEC85Ω Pcas9(Spy)-cas9(Spy) | (16) |
| pEC368 | pEC85Ω171 tracrRNA-Pcas9(Spy)-cas9(Spy) (16) | |
| pEC710 | pEC85Ω171 tracrRNA-Pcas9(Spy)-CtHis | This study |
| pEC714 | pEC710Ωcas9(Spy) | This study |
| pEC553 | pEC710Ωcas9-HH983AA(Spy)-CtHis | This study |
| pEC615 | pEC553ΩspeM | This study |
| pEC554 | pEC710Ωcas9-D10A(Spy)-CtHis | This study |
| pEC659 | pEC554ΩspeM | This study |
| pEC555 | pEC710Ωcas9-H840A(Spy)-CtHis | This study |
| pEC660 | pEC555ΩspeM | This study |
| pEC556 | pEC710Ωcas9-N854A(Spy)-CtHis | This study |
| pEC661 | pEC556ΩspeM | This study |
| pEC557 | pEC710Ωcas9-N863A(Spy)-CtHis | This study |
| pEC618 | pEC557ΩspeM | This study |
| pEC558 | pEC710Ωcas9-D986A(Spy)-CtHis | This study |
| pEC662 | pEC558ΩspeM | This study |
| pEC559 | pEC710Ωcas9-E762A(Spy)-CtHis | This study |
| pEC619 | pEC559ΩspeM | This study |
| pEC518 | pEC710Ωcas9(Cje)-CtHis | This study |
| pEC538 | pEC710Ωcas9(Fno)-CtHis | This study |
| pEC544 | pEC710Ωcas9(Nme)-CtHis | This study |
| pEC520 | pEC710Ωcas9(Pmu)-CtHis | This study |
| pEC519 | pEC710Ωcas9(Smu)-CtHis | This study |
| pEC521 | pEC710Ωcas9(Sth*)-CtHis | This study |
| pEC522 | pEC710Ωcas9(Sth**)-CtHis | This study |

Plasmids for rnc co-evolution analysis in S. pyogenes SF370

| | | |
|---|---|---|
| pEC483 | pEC85ΩPrnc(Spy) | This study |
| pEC484 | pEC85ΩPrnc(Spy)-rnc(Spy) | This study |
| pEC505 | pEC85ΩPrnc(Spy)-rnc-catalytically inactive(Spy) | This study |
| pEC504 | pEC85ΩPrnc(Spy)-rn-RNA binding inactive(Spy) | This study |
| pEC486 | pEC85ΩPrnc(Spy)-rnc(Cje) | This study |
| pEC492 | pEC85ΩPrnc(Spy)-rnc(Eco) | This study |
| pEC537 | pEC85ΩPrnc(Spy)-rnc(Fno) | This study |
| pEC506 | pEC85ΩPrnc(Spy)-rnc(Nme) | This study |
| pEC485 | pEC85ΩPrnc(Spy)-rnc(Pmu) | This study |
| pEC507 | pEC85ΩPrnc(Spy)-rnc(Sau) | This study |
| pEC494 | pEC85ΩPrnc(Spy)-rnc(Smu) | This study |
| pEC534 | pEC85ΩPrnc(Spy)-rnc(Sth) | This study |

Plasmids for protospacer study in vitro

| | | |
|---|---|---|
| pEC287 | pEC85ΩPspeM-speM | Lab plasmid collection |
| | (10 by downstream protospacer: GGGTATTGGG) | |
| pEC691 | pEC287 (10 bp downstream protospacer: | This study |
| | TGGTATTGGG) | |
| pEC692 | pEC287 (10 bp downstream protospacer: | This study |
| | TGGTGTTGGG) | |
| pEC693 | pEC287 (10 bp downstream protospacer: | This study |
| | GGGTGATTGG) | |
| pEC694 | pEC287 (10 bp downstream protospacer: | This study |
| | GGAGAATGGG) | |
| pEC696 | pEC287 (10 bp downstream protospacer: | This study |
| | GGGTCATAGG) | |
| pEC697 | pEC287 (10 bp downstream protospacer: | This study |
| | AGAAACAGGG) | |
| pEC698 | pEC287 (10 bp downstream protospacer: | This study |
| | AGAACCAGGG) | |
| pEC701 | pEC287 (10 bp downstream protospacer: | This study |
| | GTTTGATTGG) | |
| pEC706 | pEC287 (10 bp downstream protospacer: | This study |
| | GGAAAATGGG) | |

Plasmids for Cas9 overexpression

| pEC225 | pET16b | | Novagen | |
|---|---|---|---|---|
| pEC621 | pEC225 inserted with cassette harboring NotI, | | This study | |
| | SacI, SalI site | | | |
| pEC626 | pEC621Ωcas9(Spy) | | This study | |
| pEC627 | pEC621Ωcas9-D10A(Spy) | | This study | |
| pEC628 | pEC621Ωcas9-E762A(Spy) | | This study | |
| pEC629 | pEC621Ωcas9-H840A(Spy) | | This study | |
| pEC630 | pEC621Ωcas9-N854A(Spy) | | This study | |
| pEC631 | pEC621Ωcas9-HH983AA(Spy) | | This study | |
| pEC632 | pEC621Ωcas9(Cje) | | This study | |
| pEC633 | pEC621Ωcas9(Pmu) | | This study | |
| pEC634 | pEC621Ωcas9(Nme) | | This study | |
| pEC635 | pEC621Ωcas9(Smu) | | This study | |
| pEC638 | pEC621Ωcas9-N863A(Spy) | | This study | |
| pEC639 | pEC621Ωcas9-D986A(Spy) | | This study | |
| pEC640 | pEC621Ωcas9(Sth*) | | This study | |
| pEC641 | pEC621Ωcas9(Sth**) | | This study | |
| pEC657 | pEC621Ωcas9(Fno) | | This study | |
| Purpose | Primer | Sequence 5′-3′^{a} | F/R^{b} | Usage^{c} |

tracrRNA expression in S. pyogenes SF370

| | | | | |
|---|---|---|---|---|
| tracrRNA | OLEC101 | GGACTAGCCTTATTTTAACTTG | R | NB (3′ probe) |
| | 4 | | | |

crRNA (CRISPR01 (type II-A) expression in S. pyogenes SF370

| | | | | |
|---|---|---|---|---|
| crRNA | OLEC104 | GGACCATTCAAAACAGCATAGCTCTAAAAC | R | NB (repeat) |
| | 9 | | | |

Loading controls for Northern blots

| | | | | |
|---|---|---|---|---|
| 5S rRNA | OLEC288 | CTAAGCGACTACCTTATCTCA | R | NB |

His-tagged cas9 constructs (pEC85-based)

| | | | | |
|---|---|---|---|---|
| pEC710 | OLEC215 | GCAGGAATTCATCAGTGATGGTGATGGTGATGCCCGGGTT | F | Cloning |
| | 1 | TGTCGACCTCCTAAAATAAAAAGTTTAAATTAAATC | | |
| | OLEC206 | GGTGGTCTGCAGGTTTGCAGTCAGAGTAGAATAGAAG | R | |
| | 6 | | | |
| pEC714 | OLEC209 | ATGCAGGTCGACATGGATAAGAAATACTCAATAGGC | F | Expression |
| | 6 | | | csa9(Spy) |
| | OLEC209 | ATGCAGCCCGGGGTCACCTCCTAGCTGACTCAAATC | R | |
| | 7 | | | |
| speM | OLEC286 | ATGCAGCCTGCAGGGTGACAGAGAGAAACTTGATTCAAC | F | Cloning of speM |
| | 7 | | | in other |
| | OLEC286 | ATGCAGCCTGCAGGCTTCGTTTAAGTAAACATCAAAGTG | R | plasmids |
| | 8 | | | |
| pEC518 | OLEC210 | ATGCAGGTCGACGTGGCAAGAATTTTGGCATTTG | F | Cloning |
| | 4 | | | cas9(Cje) |
| | OLEC210 | ATGCAGCCCGGGTTTTTTAAAATCTTCTCTTTGTC | R | |
| | 5 | | | |
| pEC538 | OLEC284 | ATTAGTCGACATGAATTTCAAAATATTGCCAATAG | F | Cloning |
| | 0 | | | cas9(Fno) |
| | OLEC284 | ATTACCCGGGATTATTAGATGTTTCATTATAAATAC | R | |
| | 1 | | | |
| pEC544 | OLEC209 | ATGCAGGTCGACATGGCTGCCTTCAAACCTAATCC | F | Cloning |
| | 2 | | | cas9(Nme) |
| | OLEC209 | ATGCAGCCCGGGACGGACAGGCGGGCGTTTTTTCAG | R | |
| | 3 | | | |
| pEC520 | OLEC210 | ATGCAGGTCGACATGCAAACAACAAATTTAAGTTA | F | Cloning |
| | 0 | | | cas9(Pmu) |
| | OLEC210 | ATGCAGCCCGGGACGCACAGGTTGTCTTTGCTGAG | R | |
| | 1 | | | |
| pEC519 | OLEC209 | ATGCAGGTCGACATGAAAAAACCTTACTCTATTGGAC | F | Cloning |
| | 0 | | | cas9(Smu) |
| | OLEC209 | ATGCAGCCCGGGGTCTCCTCCTAACTTATTGAGATC | R | |
| | 1 | | | |
| pEC521 | OLEC209 | ATGCAGGTCGACATGACTAAGCCATACTCAATTGG | F | Cloning |
| | 8 | | | cas9(Sth*) |
| | OLEC209 | ATGCAGCCCGGGACCCTCTCCTAGTTTGGCAAGGTC | R | |
| | 9 | | | |
| pEC522 | OLEC210 | ATGCAGGTCGACATGAGTGACTTAGTTTTAGGACTTG | F | Cloning |
| | 2 | | | cas9(Sth**) |
| | OLEC210 | ATGCAGCCCGGGAAAATCTAGCTTAGGCTTATCACC | R | |
| | 3 | | | |
| pEC553 | OLEC222 | GTACGTGAGATTAACAATTACGCTGCTGCCCATGATGCGT | F | Mutagenesis |
| | 9 | ATCTA | | cas9- |
| | OLEC223 | TAGATACGCATCATGGGCAGCAGCGTAATTGTTAATCTCA | R | HH983AA(Spy) |
| | 0 | CGTAC | | |
| pEC554 | OLEC212 | GAAATACTCAATAGGCTTAGCTATCGGCACAAATAGCGTC | F | Mutagenesis |
| | 8 | G | | cas9-D10A(Spy) |
| | OLEC212 | CGACGCTATTTGTGCCGATAGCTAAGCCCTATTGAGTATT | R | |
| | 9 | TC | | |
| pEC555 | OLEC222 | TTTAAGTGATTATGATGTCGATGCCATTGTTCCACAAAGT | F | Mutagenesis |
| | 3 | TTCCT | | cas9-H840A(Spy) |
| | OLEC222 | AGGAAACTTTGTGGAACAATGGCATCGACATCATAATCAC | R | |
| | 4 | TTAAA | | |
| pEC556 | OLEC222 | CCTTAAAGACGATTCAATAGACGCTAAGGTCTTAACGCGT | F | Mutagenesis |
| | 5 | TCTGA | | cas9-N854A(Spy) |
| | OLEC222 | TCAGAACGCGTTAAGACCTTAGCGTCTATTGAATCGTCTT | R | |
| | 6 | TAAGG | | |
| pEC557 | OLEC222 | GGTCTTAACGCGTTCTGATAAAGCTCGTGGTAAATCGGAT | F | Mutagenesis |
| | 7 | AACGT | | cas9-N863A(Spy) |
| | OLEC222 | ACGTTATCCGATTTACCACGAGCTTTATCAGAACGCGTTA | R | |
| | 8 | AGACC | | |
| pEC558 | OLEC223 | GTAACAATTACCATCATGCCCATGCTGCGTATCTAAATGC | F | Mutagenesis |
| | 1 | CGTCG | | cas9-D986A(Spy) |
| | OLEC223 | CGACGGCATTTAGATACGCAGCATGGGCATGATGGTAATT | R | |
| | 2 | GTTAC | | |
| pEC559 | OLEC222 | CAGAAAATATCGTTATTGCAATGGCACGTGAAAATCAGAC | F | Mutagenesis |
| | 1 | A | | cas9-E762A(Spy) |
| | OLEC222 | TGTCTGATTTTCACGTGCCATTGCAATAACGATATTTTCT | R | |
| | 2 | G | | |

rnc constructs (pEC85-based)

| | | | | |
|---|---|---|---|---|
| pEC483 | OLEC214 | ATGCAGGCATGCCCTGTAGTTTTGGCTTGTCTGATC | F | Cloning in |
| | 0 | | | pEC85 |
| | OLEC327 | ATGCAGAGCTCCATGGAAAATCCCTTTCATATTTGTCAGT | R | |
| | 4 | AGACC | | |
| pEC484 | OLEC210 | ATGCAGCCATGGAACAGCTTGAAGAGTTACTCTCAAC | F | Cloning |
| | 9 | | | rnc(Spy), SEQ |
| | OLEC166 | CTTTTAAAAACATCTAAACCTCAC | R | |
| | 8 | | | |
| pEC504 | OLEC210 | ATGCAGCCATGGAACAGCTTGAAGAGTTACTCTCAAC | F | Cloning of rnc |
| | 9 | | | RNA binding |
| | OLEC265 | ATGCAGGAATTCCTACCCTTTTTCCACCTGAGGAATC | R | inactive(Spy) |
| | 6 | | | |
| pEC505 | OLEC214 | GAACGCTTGGAATTTTAGGAGCCGCTGTTCTACAATTGAT | F | Mutagenesis of |
| | 2 | TATT | | catalytically |
| | OLEC214 | AATAATCAATTGTAGAACAGCGGCTCCTAAAAATTCCAAG | R | inactive(Spy) |
| | 3 | CGTTC | | |
| pEC486 | OLEC211 | ATGCAGCCATGGAAAACATTGAAAAGCTAGAGCAGAG | F | Cloning |
| | 6 | | | rnc(Cje), SEQ |
| | OLEC211 | ATGCAGGAATTCCTATAAAGCTCCTAATTTCTCAAG | R | |
| | 7 | | | |
| pEC492 | OLEC212 | ATGCAGCCATGGACCCCATCGTAATTAATCGGCTTC | F | Cloning |
| | 4 | | | rnc(Eco), SEQ |
| | OLEC212 | ATGCAGGAATTCTCATTCCAGCTCCAGTTTTTTCAACG | R | |
| | 5 | | | |
| pEC537 | OLEC284 | ATTACCATGGTTCCTGAATATTCACGATTTTATAAC | F | Cloning |
| | 2 | | | rnc(Fno), SEQ |
| | OLEC284 | ATTGAATTCCTATTTTTTTTCATGTAAGCCTTGTTGTG | R | |
| | 3 | | | |
| pEC506 | OLEC211 | ATGCAGCCATGGAAGACGATGTTTTGAAACAGCAGG | F | Cloning |
| | 8 | | | rnc(Nme), SEQ |
| | OLEC211 | ATGCAGGAATTCTCATTTCTTTTTCTTCTTCAGCGGC | R | |
| | 9 | | | |
| Pec485 | OLEC211 | ATGCAGCCATGGCTCAAAATTTAGAACGTTTACAACG | F | Cloning |
| | 4 | | | rnc(Pmu), SEQ |
| | OLEC211 | ATGCAGGAATTCTCATTTCATTTCCAATAATTGT | R | |
| | 5 | | | |
| pEC507 | OLEC212 | ATGCAGCCATGGCTAAACAAAAGAAAAGTGAGATAG | F | Cloning |
| | 6 | | | rnc(Sau), SEQ |
| | OLEC212 | ATGCAGGAATTCCTATTTAATTTGTTTTAATTGCTTATAG | R | |
| | 7 | G | | |
| pEC494 | OLEC211 | ATGCAGCCATGGAAACATTAGAAAAAAAACTGGCAG | F | Cloning |
| | 0 | | | rnc(Smu), SEQ |
| | OLEC211 | ATGCAGGAATTCTTAAGAACCTCGTTGAAGTTTTTC | R | |
| | 1 | | | |
| pEC534 | OLEC284 | ATTACCATGGATCAACTTGAACAAAAACTTGAACAGGACT | F | Cloning |
| | 9 | TTGG | | rnc(Sth), SEQ |
| | OLEC285 | ATTAGAATTCTTAATTACCTAGTTGTTCAAGGGCAGACTT | R | |
| | 0 | CGC | | |

Cas9 overexpression (pEC621 based)

| | | | | |
|---|---|---|---|---|
| pEC621 | OLEC297 | TAGCGGCCGCGAGCTCGTCGACGC | F | Cassette |
| | 8 | | | inserting NotI, |
| | OLEC297 | TAGCGTCGACGAGCTCGCGGCCGC | R | SacI, SalI, |
| | 9 | | | site in pEC225 |
| pEC626, 627, | OLEC209 | ATGCAGGTCGACATGGATAAGAAATACTCAATAGGC | F | Cloning |
| 628, 629, | 7 | | | cas9(Spy and |
| 630, 631, | OLEC209 | AGCTAGCGGCCGCTCAGTCACCTCCTAGCTGACTCAAATC | R | all mutants) |
| 638, 639 | 3 | | | |
| pEC632 | OLEC210 | ATGCAGGTCGACGTGGCAAGAATTTTGGCATTTG | F | Cloning |
| | 4 | | | cas9(Cje) |
| | OLEC298 | ATGCAGCGGCCGCTCATTTTTTAAAATCTTCTCTTTGTC | R | |
| | 6 | | | |
| pEC633 | OLEC210 | ATGCAGGTCGACATGCAAACAACAAATTTAAGTTA | F | Cloning |
| | 0 | | | cas9(Pmu) |
| | OLEC217 | ATGACGCGGCCGCTTAACGCACAGGTTGTCTTTGCTG | R | |
| | 3 | | | |
| pEC634 | OLEC209 | ATGCAGGTCGACATGGCTGCCTTCAAACCTAATCC | F | Cloning |
| | 2 | | | cas9(Nme) |
| | OLEC298 | ATGACGCGGCCGCTTAACGGACAGGCGGGCGTTTTTTCAG | R | |
| | 2 | | | |
| pEC635 | OLEC209 | ATGCAGGTCGACATGAAAAAACCTTACTCTATTGGAC | F | Cloning |
| | 0 | | | cas9(Smu) |
| | OLEC298 | ATGACGCGGCCGCTTAGTCTCCTCCTAACTTATTGAG | R | |
| | 1 | | | |
| pEC640 | OLEC209 | ATGCAGGTCGACATGACTAAGCCATACTCAATTGG | F | Cloning |
| | 8 | | | cas9(Sth*) |
| | OLEC298 | ATGACGCGGCCGCTTAACCCTCTCCTAGTTTGGCAAG | R | |
| | 4 | | | |
| pEC641 | OLEC210 | ATGCAGGTCGACATGAGTGACTTAGTTTTAGGACTTG | F | Cloning |
| | 2 | | | cas9(Sth**) |
| | OLEC298 | ATGACGCGGCCGCTTAAAAATCTAGCTTAGGCTTATCAC | R | |
| | 2 | | | |
| pEC657 | OLEC284 | ATTAGTCGACATGAATTTCAAAATATTGCCAATAG | F | Cloning |
| | 0 | | | cas9(Fno) |
| | OLEC298 | ATGCAGCGGCCGCCTAATTATTAGATGTTTCATTATAAAT | R | |
| | 7 | AC | | |

Mutagenesis 10 bp downstream of speM protospacer

| | | | | |
|---|---|---|---|---|
| pEC691 | OLEC314 | CAACCACTAATTTCTAGAAAAATCTTCG | R | Mutagenesis |
| | 0 | | | on pEC287 |
| | OLEC314 | CAATTTGTAAAAAATGGTATTGGGGAATTC | F | |
| | 1 | | | |
| pEC692 | OLEC314 | CAACCACTAATTTCTAGAAAAATCTTCG | R | Mutagenesis |
| | 0 | | | on pEC287 |
| | OLEC3E14 | CAATTTGTAAAAAATGGTGTTGGGGAATTC | F | |
| | 2 | | | |
| pEC693 | OLEC314 | CAACCACTAATTTCTAGAAAAATCTTCG | R | Mutagenesis |
| | 0 | | | on pEC287 |
| | OLEC314 | CAATTTGTAAAAAAGGGTGATTGGGAATTC | F | |
| | 4 | | | |
| pEC694 | OLEC314 | CAACCACTAATTTCTAGAAAAATCTTCG | R | Mutagenesis |
| | 0 | | | on pEC287 |
| | OLEC314 | CAATTTGTAAAAAAGGAGAATGGGGAATTC | F | |
| | 3 | | | |
| pEC696 | OLEC319 | CAACCACTAATTTTTAGAAAAATCTTCG | R | Mutagenesis |
| | 4 | | | on pEC693 |
| | OLEC319 | CAATTTGTAAAAAAGGGTCATAGGGAATTC | F | |
| | 7 | | | |
| pEC697 | OLEC319 | CAACCACTAATTTTTAGAAAAATCTTCG | R | Mutagenesis |
| | 4 | | | on pEC694 |
| | OLEC319 | CAATTTGTAAAAAAGAAACAGGGGAATTC | F | |
| | 8 | | | |
| pEC698 | OLEC319 | CAACCACTAATTTTTAGAAAAATCTTCG | R | Mutagenesis |
| | 4 | | | on pEC694 |
| | OLEC319 | CAATTTGTAAAAAAGAACCAGGGGAATTC | F | |
| | 9 | | | |
| pEC701 | OLEC319 | CAACCACTAATTTTTAGAAAAATCTTCG | R | Mutagenesis |
| | 4 | | | on pEC693 |
| | OLEC320 | CAATTTGTAAAAAAGTTTGATTGGGAATTC | F | |
| | 4 | | | |
| pEC706 | OLEC319 | CAACCACTAATTTTTAGAAAAATCTTCG | R | Mutagenesis |
| | 4 | | | on pEC696 |
| | OLEC320 | CAATTTGTAAAAAAGGAAAATGGGGAATTC | F | |
| | 8 | | | |

In vitro tracrRNA and crRNA of Streptococcus pyogenes SF370 (speM spacer underlined)

| | | | | |
|---|---|---|---|---|
| T7-tracrRNA | OLEC152 | GAAATTAATACGACTCACTATAGAAAACAGCATAGCAAGT | F | T7-tracrRNA 5′ |
| | 1 | TAAAATAA | | |
| | OLEC152 | AAAAAAAGCACCGACTCGGTGCCAC | R | T7-tracrRNA 3′ |
| | 2 | | | |
| T7-crRNA | OLEC217 | GAAATTAATACGACTCACTATAGGATAACTCAATTTGTAA | F | crRNA speM 5′ |
| (template) | 7 | AAAAGTTTTAGAGCTATGCTGTTTTG | | |
| | OLEC217 | CAAAACAGCATAGCTCTAAAACTTTTTTACAAATTGAGTT | R | crRNA speM 3′ |
| | 9 | ATCCTATAGTGAGTCGTATTAATTTC | | |

In vitro tracrRNA and crRNA of Neisseria meningitidis A Z2491 (speM spacer underlined)

| | | | | |
|---|---|---|---|---|
| T7-tracrRNA | OLEC308 | GAAATTAATACGACTCACTATAGGGAGAGCGAAATGAGAA | F | T7-tracrRNA 5′ |
| (template) | 3 | CCGTTGCTACAATAAGGCGTCTGAAAAGATGTGCCGCAAC | | |
| | | GCTCTGCCCTTAAAGCTTCTGCTTTAAGGGGCATCGTTTA | | |
| | | TT | | |
| | OLEC308 | AATAAACGATGCCCCTTAAAGCAGAAGCTTTAAGGGGCAG | R | T7-tracrRNA 3′ |
| | 4 | AGCGTTGCGGCACATCTTTTCAGACGCCTTATTGTAGCAA | | |
| | | CGGTTCTCATTTCGCTCTCCCTATAGTGAGTCGTATTAAT | | |
| | | TC | | |
| T7-crRNA | OLEC220 | GAAATTAATACGACTCACTATAGATGATAACTCAATTTGT | F | crRNA speM 5′ |
| (template) | 9 | AAAAAAGTTGTAGCTCCCTTTCTCATTT | | |
| | OLEC221 | AAATGAGAAAGGGAGCTACAACTTTTTTACAAATTGAGTT | R | crRNA speM 3′ |
| | 4 | ATCATCTATAGTGAGTCGTATTAATTTC | | |

In vitro tracrRNA and crRNA of UA159 (speM spacer underlined)

| | | | | |
|---|---|---|---|---|
| T7-tracrRNA | OLEC309 | GAAATTAATACGACTCACTATAGGAAACAACACAGCAAGT | F | T7-tracrRNA 5′ |
| | 8 | TAAAATAAG | | |
| | OLEC309 | AAATAAAAAAGCACCGAATCGG | R | T7-tracrRNA 3′ |
| | 9 | | | |
| T7-crRNA | OLEC308 | GAAATTAATACGACTCACTATAGGATAACTCAATTTGTAA | F | crRNA speM 5′ |
| (template) | 5 | AAAAGTTTTAGAGCTGTGTTGT | | |
| | OLEC308 | ACAACACAGCTCTAAAACTTTTTTACAAATTGAGTTATCC | R | crRNA speM 3′ |
| | 6 | TATAGTGAGTCGTATTAATTTC | | |

In vitro tracrRNA and crRNA of Campylobacter jejuni NCTC 11168 (speM spacer underlined)

| | | | | |
|---|---|---|---|---|
| T7-tracrRNA | OLEC312 | GAAATTAATACGACTCACTATAGGAAGGGACTAAAATAAA | F | T7-tracrRNA 5′ |
| (template) | 8 | GAGTTTGCGGGACTCTGCGGGGTTACAATCCCCTAAAACC | | |
| | | GC | | |
| | OLEC312 | GCGGTTTTAGGGGATTGTAACCCCGCAGAGTCCCGCAAAC | R | T7-tracrRNA 3′ |
| | 9 | TCTTTATTTTAGTCCCTTCCTATAGTGAGTCGTATTAATT | | |
| | | TC | | |
| T7-crRNA | OLEC308 | GAAATTAATACGACTCACTATAGGATAACTCAATTTGTAA | F | crRNA speM 5′ |
| (template) | 7 | AAAAGTTTTAGTCCCT | | |
| | OLEC308 | AGGGACTAAAACTTTTTTACAAATTGAGTTATCCTATAGT | R | crRNA speM 3′ |
| | 8 | GAGTCGTATTAATTTC | | |

In vitro tracrRNA and crRNAs of Francisella novicida U112 (speM spacer underlined)

| | | | | |
|---|---|---|---|---|
| T7-tracrRNA | OLEC310 | GAAATTAATACGACTCACTATAGGGTACCAAATAATTAAT | F | T7-tracrRNA 5′ |
| | 2 | GCTCTG | | |
| | OLEC310 | GTTATTCAGACGTGTCAAACAG | R | T7-tracrRNA 3′ |
| | 3 | | | |
| T7-crRNA | OLEC308 | GAAATTAATACGACTCACTATAGGATAACTCAATTTGTAA | F | crRNA speM 5′ |
| (template) | 9 | AAAAGTTTCAGTTGCTGAATTATTTGGTAAC | | |
| | OLEC309 | GTTTACCAAATAATTCAGCAACTGAAACTTTTTTACAAAT | R | crRNA speM 3′ |
| | 0 | TGAGTTATCCTATAGTGAGTCGTATTAATTTC | | |

In vitro tracrRNA and crRNAs of Streptococcus thermophilus* LMD-9 (speM spacer underlined)

| | | | | |
|---|---|---|---|---|
| T7-tracrRNA | OLEC310 | GAAATTAATACGACTCACTATAGGAACAACACAGCGAGTT | F | T7-tracrRNA 5′ |
| | 4 | AAAATAAGG | | |
| | OLEC310 | AAAAAAAACACCGAATCGGTG | R | T7-tracrRNA 3′ |
| | 5 | | | |
| T7-crRNA | OLEC308 | GAAATTAATACGACTCACTATAGGATAACTCAATTTGTAA | F | crRNA speM 5′ |
| (template) | 5 | AAAAGTTTTAGAGCTGTGTTGT | | |
| | OLEC308 | ACAACACAGCTCTAAAACTTTTTTACAAATTGAGTTATCC | R | crRNA speM 3′ |
| | 6 | TATAGTGAGTCGTATTAATTTC | | |

In vitro tracrRNA and crRNAs of Pasteurella multocida pM70 (speM spacer underlined)

| | | | | |
|---|---|---|---|---|
| T7-tracrRNA | OLEC310 | GAAATTAATACGACTCACTATAGGCTGCGAAATGAGAGAC | F | T7-tracrRNA 5′ |
| | 8 | GTTGCTAC | | |
| | OLEC310 | AAAAACGATGCCCCTTGCAATTAAG | R | T7-tracrRNA 3′ |
| | 9 | | | |
| T7-crRNA | OLEC309 | GAAATTAATACGACTCACTATAGGATAACTCAATTTGTAA | F | crRNA speM 5′ |
| (template) | 3 | AAAAGTTGTAGTTCCCTCTCTCATTTCGC | | |
| | OLEC309 | GCGAAATGAGAGAGGGAACTACAACTTTTTTACAAATTGA | R | crRNA speM 3′ |
| | 4 | GTTATCCTATAGTGAGTCGTATTAATTTC | | |

Primers for sequencing analysis
cas9 Streptococcus mutans UA159

| | | | | |
|---|---|---|---|---|
| cas9(Smu) | OLEC279 | ATGAAAAAACCTTACTCTATTGGA | F | SEQ |
| | 2 | | | |
| | OLEC279 | GATTTTAAAAAGCATTTTGAATTA | F | SEQ |
| | 3 | | | |
| | OLEC279 | TACTTGCCAAATCAAAAAGTTCTT | F | SEQ |
| | 4 | | | |
| | OLEC279 | ATTATGGGACATCAACCTGAAAAT | F | SEQ |
| | 5 | | | |
| | OLEC279 | TACCCACAATTGGAACCTGAATTT | F | SEQ |
| | 6 | | | |

cas9 Neisseria meningitidis A Z2491

| | | | | |
|---|---|---|---|---|
| cas9(Nme) | OLEC279 | ATGGCTGCCTTCAAACCTAATCCA | F | SEQ |
| | 7 | | | |
| | OLEC279 | GTTCAAAAAATGTTGGGGCATTGC | F | SEQ |
| | 8 | | | |
| | OLEC279 | ATCCATATTGAAACTGCAAGGGAA | F | SEQ |
| | 9 | | | |
| | OLEC280 | AACGCGTTTGACGGTAAAACCATA | F | SEQ |
| | 0 | | | |

cas9 Streptococcus thermophilus* LMD-9

| | | | | |
|---|---|---|---|---|
| cas9(Sth*) | OLEC280 | ATGACTAAGCCATACTCAATTGGA | F | SEQ |
| | 7 | | | |
| | OLEC280 | GATTTTAGGAAATGTTTTAATTTA | F | SEQ |
| | 8 | | | |
| | OLEC280 | TATTTGCCAGAAGAGAAGGTACTT | F | SEQ |
| | 9 | | | |
| | OLEC281 | GTAATGGGAGGAAGAAAACCCGAG | F | SEQ |
| | 0 | | | |
| | OLEC281 | GCAAGTGCTTTACTTAAGAAATAC | F | SEQ |
| | 1 | | | |
| | OLEC281 | TTACTTTATCATGCTAAGAGAATA | F | SEQ |
| | 2 | | | |

cas9 Streptococcus thermophilus** LMD-9

| | | | | |
|---|---|---|---|---|
| cas9(Sth**) | OLEC281 | ATGAGTGACTTAGTTTTAGGACTT | F | SEQ |
| | 7 | | | |
| | OLEC281 | ATTTTTGGAATTCTAATTGGGAAA | F | SEQ |
| | 9 | | | |
| | OLEC281 | GGAGACTTTGACAATATTGTCATC | F | SEQ |
| | 9 | | | |
| | OLEC282 | TTGAATTTGTGGAAAAAACAAAAG | F | SEQ |
| | 0 | | | |
| | OLEC282 | CAGGAAAAATACAATGACATTAAG | F | SEQ |
| | 1 | | | |

cas9 Pasteurella multocida Pm70

| | | | | |
|---|---|---|---|---|
| cas9(Pmu) | OLEC281 | ATGCAAACAACAAATTTAAGTTAT | F | SEQ |
| | 3 | | | |
| | OLEC281 | ACGCATGAAAAAAATGAGTTTAA | F | SEQ |
| | 4 | | | |
| | OLEC281 | CTTGGGAAATCTTTTAAAGAACGT | F | SEQ |
| | 5 | | | |
| | OLEC281 | TATGAAATGGTGGATCAAGAAAGC | F | SEQ |
| | 6 | | | |

cas9 Campylobacter jejuni NCTC 11168

| | | | | |
|---|---|---|---|---|
| cas9(Cje) | OLEC282 | GTGGCAAGAATTTTGGCATTTGAT | F | SEQ |
| | 2 | | | |
| | OLEC282 | GATGAAAAAAGAGCGCCAAAAAAT | F | SEQ |
| | 3 | | | |
| | OLEC282 | AACTACAAGGCCAAAAAAGACGCC | F | SEQ |
| | 4 | | | |
| | OLEC282 | AACAAAAGGAAGTTTTTTGAGCCT | F | SEQ |
| | 5 | | | |

cas9 Francisella novicida U112

| | | | | |
|---|---|---|---|---|
| cas9(Fno) | OLEC286 | ATGAATTTCAAAATATTGCCAATA | F | SEQ |
| | 9 | | | |
| | OLEC287 | TTAGATACTCTTTTAACTGATGAT | F | SEQ |
| | 0 | | | |
| | OLEC287 | TTAAAAGTCTTAAAGTCAAGTAAA | F | SEQ |
| | 1 | | | |
| | OLEC287 | GGTTCAGAAGATAAAAAAGGTAAT | F | SEQ |
| | 2 | | | |
| | OLEC287 | AGAATTTTCTGCCTACGTGATCTT | F | SEQ |
| | 3 | | | |
| | OLEC287 | CCAATACTAATCCATAAAGAACT | F | SEQ |
| | 4 | | | |
| | OLEC287 | ACATCAAAAAATATTTTTTGGCTG | F | SEQ |
| | 5 | | | |

^{a}italic, sequence annealing to the template; underlined, restriction site; bold, T7 promoter
^{b}F, forward primer; R, reverse primer.
^{c}NB, probe for Northern blot; SEQ, sequencing

### Example 1

### Diversity of Cas9 Orthologs

[0492] To investigate the evolution and diversity of dual-RNA:Cas9 systems, publicly available genomes were subjected to multiple rounds of BLAST search using previously retrieved Cas9 sequences as queries (15). Cas9 orthologs were identified in 653 bacterial strains representing 347 species (Supplementary Table S2). After removing incomplete or highly similar sequences, we selected 83 diverse, representative Cas9 orthologs for multiple sequence alignment and phylogenetic tree reconstruction (FIG. 1A, Supplementary Table S2, Supplementary FIGS. S2 and S4, see Materials and Methods). The Cas9 tree topology largely agrees with the phylogeny of the corresponding Cas1 proteins (Supplementary Table S2, Supplementary FIGS. S3 and S4) and fully supports the previously described classification of type II CRISPR-Cas into three subtypes, II-A (specified by csn2), II-B (characterized by long and most diverged cas9 variants (formerly csx12) and cas4), and II-C(three-cas gene operon) (15).

Supplementary Table S2. List of bacterial strains with identified Cas9 orthologs.

| | | Cas9 | | | |
|---|---|---|---|---|---|
| | | length | | | |
| Cluster^{a} | Strain^{b} | (aa) | Cas9 GI | Cas1GI^{c} | Subtype^{d} |
| 1 | Dolosigranulum pigrum ATCC 51524 | 1332 | 375088882 | | Type II-A |
| | Enterococcus faecalis ATCC 29200 | 1337 | 229548613 | | |
| | Enterococcus faecalis ATCC 4200 | 1337 | 256617555 | | |
| | Enterococcus faecalis D6 | 1337 | 257086028 | | |
| | Enterococcus faecalis E1Sol | 1337 | 257080914 | | |
| | Enterococcus faecalis OG1RF | 1337 | 384512368 | | |
| | Enterococcus faecalis TX0470 | 1337 | 312900261 | | |
| | Enterococcus faecalis TX4244 | 1337 | 422695652 | | |
| | Enterococcus faecium 1,141,733 | 1339 | 257888853 | | |
| | Enterococcus faecium 1,231,408 | 1340 | 257893735 | | |
| | Enterococcus faecium E1133 | 1339 | 430847551 | | |
| | Enterococcus faecium E3083 | 1340 | 431757680 | | |
| | Enterococcus faecium PC4.1 | 1340 | 293379700 | | |
| | Enterococcus faecium TX1330 | 1340 | 227550972 | | |
| | Enterococcus faecium TX1337RF | 1340 | 424765774 | | |
| | Enterococcus hirae ATCC 9790 | 1336 | 392988474 | | |
| | Enterococcus italicus DSM 15952 | 1330 | 315641599 | | |
| | Lactobacillus animalis KCTC 3501 | 1314 | 335357451 | | |
| | Listeria innocua ATCC 33091 | 1337 | 423101383 | | |
| | Listeria innocua Clip11262 | 1334 | 16801805 | | |
| | Listeria innocua FSL S4-378 | 1103 | 422414122 | | |
| | Listeria ivanovii FSL F6-596 | 953 | 315305353 | | |
| | Listeria monocytogenes 10403S | 1334 | 386044902 | | |
| | Listeria monocytogenes FSL J1-175 | 1099 | 255520581 | | |
| | Listeria monocytogenes FSL J1-194 | 1334 | 254825045 | | |
| | Listeria monocytogenes FSL J1-208 | 1334 | 422810631 | | |
| | Listeria monocytogenes FSL N3-165 | 1334 | 254829042 | | |
| | Listeria monocytogenes FSL R2-503 | 1334 | 254854201 | | |
| | Listeria monocytogenes str. 1/2a F6854 | 1334 | 47097148 | | |
| | Streptococcus agalactiae 2603V/R | 1370 | 22537057 | | |
| | Streptococcus agalactiae 515 | 1377 | 77413160 | | |
| | Streptococcus agalactiae A909 | 1370 | 76788458 | | |
| | Streptococcus agalactiae ATCC 13813 | 1378 | 339301617 | | |
| | Streptococcus agalactiae CJB111 | 1370 | 77411010 | | |
| | Streptococcus agalactiae COH 1 | 1370 | 77407964 | | |
| | Streptococcus agalactiae FSL S3-026 | 1370 | 417005168 | | |
| | Streptococcus agalactiae GB00112 | 1370 | 421147428 | | |
| | Streptococcus agalactiae H36B | 1370 | 77405721 | | |
| | Streptococcus agalactiae NEM316 | 1377 | 25010965 | | |
| | Streptococcus agalactiae SA20-06 | 1370 | 410594450 | | |
| | Streptococcus agalactiae STIR-CD-17 | 1370 | 421532069 | | |
| | Streptococcus anginosus F0211 | 1345 | 315223162 | | |
| | Streptococcus anginosus SK1138 | 1386 | 421490579 | | |
| | Streptococcus anginosus SK52 = DSM 20563 | 1396 | 335031483 | | |
| | Streptococcus bovis ATCC 700338 | 1373 | 306833855 | | |
| | Streptococcus canis FSL Z3-227 | 1375 | 392329410 | | |
| | Streptococcus constellatus subsp. constellatus | 1345 | 418965022 | | |
| | SK53 | | | | |
| | Streptococcus dysgalactiae subsp. equisimilis | 1371 | 410494913 | | |
| | AC-2713 | | | | |
| | Streptococcus dysgalactiae subsp. equisimilis | 1371 | 386317166 | | |
| | ATCC 12394 | | | | |
| | Streptococcus dysgalactiae subsp. equisimilis | 1371 | 251782637 | | |
| | GGS_124 | | | | |
| | Streptococcus dysgalactiae subsp. equisimilis | 1371 | 408401787 | | |
| | RE378 | | | | |
| | Streptococcus equi subsp. zooepidemicus | 1348 | 195978435 | | |
| | MGCS10565 | | | | |
| | Streptococcus equinus ATCC 9812 | 1377 | 320547102 | | |
| | Streptococcus gallolyticus subsp. gallolyticus | 1370 | 325978669 | | |
| | ATCC BAA-2069 | | | | |
| | Streptococcus gallolyticus subsp. gallolyticus | 1370 | 306831733 | | |
| | TX20005 | | | | |
| | Streptococcus gallolyticus UCN34 | 1371 | 288905639 | | |
| | Streptococcus infantarius subsp. infantarius | 1375 | 379705580 | | |
| | CJ18 | | | | |
| | Streptococcus iniae 9117 | 1368 | 406658208 | | |
| | Streptococcus macacae NCTC 11558 | 1338 | 357636406 | | |
| | Streptococcus mitis SK321 | 1392 | 307710946 | | |
| | Streptococcus mutans 11SSST2 | 1345 | 449165720 | | |
| | Streptococcus mutans 11SSST2 | 1345 | 449951835 | | |
| | Streptococcus mutans 11VS1 | 1345 | 449976542 | | |
| | Streptococcus mutans 14D | 1345 | 450149988 | | |
| | Streptococcus mutans 15VF2 | 1355 | 449170557 | | |
| | Streptococcus mutans 15VF2 | 1355 | 449965974 | | |
| | Streptococcus mutans 1SM1 | 1345 | 449158457 | | |
| | Streptococcus mutans 1SM1 | 1345 | 449920643 | | |
| | Streptococcus mutans 24 | 1350 | 449247589 | | |
| | Streptococcus mutans 24 | 1350 | 450180942 | | |
| | Streptococcus mutans 2VS1 | 1345 | 449174812 | | |
| | Streptococcus mutans 2VS1 | 1345 | 449968746 | | |
| | Streptococcus mutans 3SN1 | 1345 | 449162653 | | |
| | Streptococcus mutans 3SN1 | 1345 | 449931425 | | |
| | Streptococcus mutans 4SM1 | 1345 | 449159838 | | |
| | Streptococcus mutans 4SM1 | 1345 | 449927152 | | |
| | Streptococcus mutans 4VF1 | 1345 | 449167132 | | |
| | Streptococcus mutans 4VF1 | 1345 | 449961027 | | |
| | Streptococcus mutans 5SM3 | 1345 | 449176693 | | |
| | Streptococcus mutans 5SM3 | 1345 | 449980571 | | |
| | Streptococcus mutans 66-2A | 1359 | 449240165 | | |
| | Streptococcus mutans 66-2A | 1359 | 450160342 | | |
| | Streptococcus mutans 8ID3 | 1345 | 449154769 | | |
| | Streptococcus mutans 8ID3 | 1345 | 449872064 | | |
| | Streptococcus mutans A19 | 1345 | 449187668 | | |
| | Streptococcus mutans A19 | 1345 | 450013175 | | |
| | Streptococcus mutans B | 1345 | 450166294 | | |
| | Streptococcus mutans G123 | 1345 | 450029806 | | |
| | Streptococcus mutans GS-5 | 1345 | 397650022 | | |
| | Streptococcus mutans LJ23 | 1345 | 387785882 | | |
| | Streptococcus mutans M21 | 1345 | 449194333 | | |
| | Streptococcus mutans M21 | 1345 | 450036249 | | |
| | Streptococcus mutans M230 | 1345 | 449260994 | | |
| | Streptococcus mutans M230 | 1345 | 449903532 | | |
| | Streptococcus mutans M2A | 1345 | 449209586 | | |
| | Streptococcus mutans M2A | 1345 | 450074072 | | |
| | Streptococcus mutans N29 | 1345 | 449182997 | | |
| | Streptococcus mutans N29 | 1345 | 450003067 | | |
| | Streptococcus mutans N3209 | 1345 | 449210660 | | |
| | Streptococcus mutans N3209 | 1345 | 450077860 | | |
| | Streptococcus mutans N66 | 1345 | 449212466 | | |
| | Streptococcus mutans N66 | 1345 | 450083993 | | |
| | Streptococcus mutans NFSM1 | 1350 | 449202104 | | |
| | Streptococcus mutans NFSM1 | 1350 | 450051112 | | |
| | Streptococcus mutans NLM L1 | 1345 | 450140393 | | |
| | Streptococcus mutans NLML4 | 1338 | 449202681 | | |
| | Streptococcus mutans NLML4 | 1338 | 450059882 | | |
| | Streptococcus mutans NLML9 | 1345 | 449209148 | | |
| | Streptococcus mutans NLML9 | 1345 | 450066176 | | |
| | Streptococcus mutans NMT4863 | 1355 | 449186850 | | |
| | Streptococcus mutans NMT4863 | 1355 | 450007078 | | |
| | Streptococcus mutans NN2025 | 1345 | 290580220 | | |
| | Streptococcus mutans NV1996 | 1345 | 450086338 | | |
| | Streptococcus mutans NVAB | 1345 | 449181424 | | |
| | Streptococcus mutans NVAB | 1345 | 449990810 | | |
| | Streptococcus mutans R221 | 1345 | 449258042 | | |
| | Streptococcus mutans R221 | 1345 | 449899675 | | |
| | Streptococcus mutans S1B | 1345 | 449251227 | | |
| | Streptococcus mutans S1B | 1345 | 449877120 | | |
| | Streptococcus mutans SF1 | 1345 | 450098705 | | |
| | Streptococcus mutans SF14 | 1345 | 449221374 | | |
| | Streptococcus mutans SF14 | 1345 | 450107816 | | |
| | Streptococcus mutans SM1 | 1345 | 449245264 | | |
| | Streptococcus mutans SM1 | 1345 | 450176410 | | |
| | Streptococcus mutans SM4 | 1345 | 449246010 | | |
| | Streptococcus mutans SM4 | 1345 | 450170248 | | |
| | Streptococcus mutans SM6 | 1345 | 449223000 | | |
| | Streptococcus mutans SM6 | 1345 | 450112022 | | |
| | Streptococcus mutans ST6 | 1350 | 449227252 | | |
| | Streptococcus mutans ST6 | 1350 | 450123011 | | |
| | Streptococcus mutans UA159 | 1345 | 24379809 | 24379808 | |
| | Streptococcus mutans W6 | 1345 | 450094364 | | |
| | Streptococcus oralis SK304 | 1373 | 421488030 | | |
| | Streptococcus oralis SK610 | 1371 | 419782534 | | |
| | Streptococcus pseudoporcinus LQ 940-04 | 1374 | 416852857 | | |
| | Streptococcus pyogenes SF370 (M1 GAS) | 1368 | 13622193 | 13622194 | |
| | Streptococcus pyogenes MGAS10270 | 1368 | 94543903 | | |
| | Streptococcus pyogenes MGAS10750 | 1371 | 94994317 | | |
| | Streptococcus pyogenes MGAS15252 | 1367 | 383479946 | | |
| | Streptococcus pyogenes MGAS2096 | 1368 | 94992340 | | |
| | Streptococcus pyogenes MGAS315 | 1368 | 21910213 | | |
| | Streptococcus pyogenes MGAS5005 | 1368 | 71910582 | | |
| | Streptococcus pyogenes MGAS6180 | 1368 | 71903413 | | |
| | Streptococcus pyogenes MGAS9429 | 1368 | 94988516 | | |
| | Streptococcus pyogenes NZ131 | 1368 | 209559356 | | |
| | Streptococcus pyogenes SSI-1 | 1368 | 28896088 | | |
| | Streptococcus ratti FA-1 = DSM 20564 | 1370 | 400290495 | | |
| | Streptococcus salivarius K12 | 1385 | 421452908 | | |
| | Streptococcus sanguinis SK115 | 1377 | 422848603 | | |
| | Streptococcus sanguinis SK330 | 1392 | 422860049 | | |
| | Streptococcus sanguinis SK353 | 1370 | 422821159 | | |
| | Streptococcus sp. C300 | 1377 | 322375978 | | |
| | Streptococcus sp. F0441 | 1371 | 414157437 | | |
| | Streptococcus sp. M334 | 1375 | 322378004 | | |
| | Streptococcus sp. oral taxon 56 str. F0418 | 1371 | 339640839 | | |
| | Streptococcus suis ST1 | 1381 | 389856936 | | |
| | Streptococcus thermophilus | 1388 | 343794781 | | |
| | Streptococcus thermophilus LMD-9 | 1388 | 116628213 | 116628212 | |
| | Streptococcus thermophilus MN-ZLW-002 | 1388 | 387910220 | | |
| | Streptococcus thermophilus ND03 | 1388 | 386087120 | | |
| 2 | Campylobacter coli 1098 | 984 | 419564797 | | Type II-C |
| | Campylobacter coli 111-3 | 984 | 419536531 | | |
| | Campylobacter coli 132-6 | 987 | 419572019 | | |
| | Campylobacter coli 151-9 | 984 | 419603415 | | |
| | Campylobacter coli 1909 | 984 | 419576091 | | |
| | Campylobacter coli 1957 | 965 | 419581876 | | |
| | Campylobacter coli 2692 | 984 | 419553162 | | |
| | Campylobacter coli 59-2 | 984 | 419578074 | | |
| | Campylobacter coli 67-8 | 965 | 419587721 | | |
| | Campylobacter coli 80352 | 965 | 419558307 | | |
| | Campylobacter coli 80352 | 987 | 419559505 | | |
| | Campylobacter jejuni subsp. doylei 269.97 | 984 | 153952471 | | |
| | Campylobacter jejuni subsp. jejuni 110-21 | 987 | 419676124 | | |
| | Campylobacter jejuni subsp. jejuni 129-258 | 987 | 419619138 | | |
| | Campylobacter jejuni subsp. jejuni 1336 | 987 | 283956897 | | |
| | Campylobacter jejuni subsp. jejuni 140-16 | 984 | 419681578 | | |
| | Campylobacter jejuni subsp. jejuni 1577 | 984 | 419685099 | | |
| | Campylobacter jejuni subsp. jejuni 1854 | 987 | 419689467 | | |
| | Campylobacter jejuni subsp. jejuni 1997-10 | 984 | 419666522 | | |
| | Campylobacter jejuni subsp. jejuni 2008-2025 | 987 | 419650041 | | |
| | Campylobacter jejuni subsp. jejuni 2008-872 | 984 | 419654778 | | |
| | Campylobacter jejuni subsp. jejuni 2008-979 | 987 | 419660762 | | |
| | Campylobacter jejuni subsp. jejuni 2008-988 | 965 | 419656328 | | |
| | Campylobacter jejuni subsp. jejuni 2008-988 | 984 | 419655317 | | |
| | Campylobacter jejuni subsp. jejuni 260.94 | 961 | 86152042 | | |
| | Campylobacter jejuni subsp. jejuni 414 | 985 | 283953849 | | |
| | Campylobacter jejuni subsp. jejuni 51037 | 984 | 419674189 | | |
| | Campylobacter jejuni subsp. jejuni 51494 | 984 | 419619463 | | |
| | Campylobacter jejuni subsp. jejuni 53161 | 987 | 419647275 | | |
| | Campylobacter jejuni subsp. jejuni 60004 | 984 | 419629136 | | |
| | Campylobacter jejuni subsp. jejuni 81116 | 984 | 157415744 | | |
| | Campylobacter jejuni subsp. jejuni 84-25 | 984 | 88596565 | | |
| | Campylobacter jejuni subsp. jejuni 87459 | 984 | 419680124 | | |
| | Campylobacter jejuni subsp. jejuni ATCC 33560 | 984 | 419643715 | | |
| | Campylobacter jejuni subsp. jejuni CF93-6 | 987 | 86149266 | | |
| | Campylobacter jejuni subsp. jejuni CG8486 | 984 | 148925683 | | |
| | Campylobacter jejuni subsp. jejuni HB93-13 | 984 | 86152450 | | |
| | Campylobacter jejuni subsp. jejuni LMG 23210 | 987 | 419696801 | | |
| | Campylobacter jejuni subsp. jejuni LMG 23211 | 984 | 419697443 | | |
| | Campylobacter jejuni subsp. jejuni LMG 23263 | 984 | 419628620 | | |
| | Campylobacter jejuni subsp. jejuni LMG 23264 | 984 | 419632476 | | |
| | Campylobacter jejuni subsp. jejuni LMG 23269 | 987 | 419634246 | | |
| | Campylobacter jejuni subsp. jejuni LMG 23357 | 987 | 419641132 | | |
| | Campylobacter jejuni subsp. jejuni LMG NCTC | 984 | 218563121 | 218563120 | |
| | 11168 | | | | |
| | Campylobacter jejuni subsp. jejuni NW | 983 | 424845990 | | |
| | Campylobacter jejuni subsp. jejuni PT14 | 987 | 407942868 | | |
| | Campylobacter lari | 1003 | 345468028 | | |
| | Helicobacter canadensis MIT 98-5491 | 1007 | 253828136 | | |
| | Helicobacter cinaedi ATCC BAA-847 | 1023 | 396079277 | | |
| | Helicobacter cinaedi CCUG 18818 | 1023 | 313144862 | | |
| | Helicobacter cinaedi PAGU611 | 1023 | 386762035 | | |
| 3 | Catellicoccus marimamalium M35/04/3 | 1140 | 424780480 | | Type II-A |
| | Lactobacillus farciminis KCTC 3681 | 1126 | 336394701 | | |
| | Listeriaceae bacterium TTU M1-001 | 1087 | 381184145 | | |
| | Streptococcus anginosus 1_2_62CV | 1125 | 319939170 | | |
| | Streptococcus gallolyticus UCN34 | 1130 | 288905632 | | |
| | Streptococcus gordonii str. Challis substr. CH1 | 1136 | 157150687 | | |
| | Streptococcus infantarius ATCC BAA-102 | 1129 | 171779984 | | |
| | Streptococcus macedonicus ACA-DC 198 | 1130 | 374338350 | | |
| | Streptococcus mitis ATCC 6249 | 1134 | 306829274 | | |
| | Streptococcus mutans NLML5 | 1128 | 449203378 | | |
| | Streptococcus mutans NLML5 | 1128 | 450064617 | | |
| | Streptococcus mutans NLML8 | 1125 | 449151037 | | |
| | Streptococcus mutans NLML8 | 1125 | 450133520 | | |
| | Streptococcus mutans ST1 | 1134 | 449228751 | | |
| | Streptococcus mutans ST1 | 1134 | 450114718 | | |
| | Streptococcus mutans U2A | 1125 | 449232458 | | |
| | Streptococcus mutans U2A | 1125 | 450125471 | | |
| | Streptococcus oralis SK1074 | 1121 | 418974877 | | |
| | Streptococcus oralis SK313 | 1134 | 417940002 | | |
| | Streptococcus parasanguinis F0449 | 1140 | 419799964 | | |
| | Streptococcus pasteurianus ATCC 43144 | 1130 | 336064611 | | |
| | Streptococcus salivarius JIM8777 | 1127 | 387783792 | | |
| | Streptococcus salivarius PS4 | 1135 | 419707401 | | |
| | Streptococcus sp. BS35b | 1026 | 401684660 | | |
| | Streptococcus sp. C150 | 1139 | 322372617 | | |
| | Streptococcus sp. GMD6S | 1121 | 406576934 | | |
| | Streptococcus suis 89/1591 | 1122 | 223932525 | | |
| | Streptococcus suis D9 | 1122 | 386584496 | | |
| | Streptococcus suis ST3 | 1122 | 330833104 | | |
| | Streptococcus thermophilus CNRZ1066 | 1128 | 55822627 | | |
| | Streptococcus thermophilus JIM 8232 | 1121 | 386344353 | | |
| | Streptococcus thermophilus LMD-9 | 1121 | 116627542 | 116627543 | |
| | Streptococcus thermophilus LMG 18311 | 1122 | 55820735 | | |
| | Streptococcus thermophilus MN-ZLW-002 | 1121 | 387909441 | | |
| | Streptococcus thermophilus MTCC 5460 | 1122 | 445374534 | | |
| | Streptococcus thermophilus ND03 | 1121 | 386086348 | | |
| | Streptococcus vestibularis ATCC 49124 | 1128 | 322517104 | | |
| 4 | Actinobacillus minor NM305 | 1056 | 240949037 | | Type II-C |
| | Actinobacillus pleuropneumoniae serovar 10 str. | 1054 | 307256472 | | |
| | D13039 | | | | |
| | Actinobacillus succinogenes 130Z | 1062 | 152978060 | | |
| | Actinobacillus suis H91-0380 | 1054 | 407692091 | | |
| | Haemophilus parainfluenzae ATCC 33392 | 1054 | 325578067 | | |
| | Haemophilus parainfluenzae CCUG 13788 | 1052 | 359298684 | | |
| | Haemophilus parainfluenzae T3T1 | 1052 | 345430422 | | |
| | Haemophilus sputorum HK 2154 | 1052 | 402304649 | | |
| | Kingella kingae PYKK081 | 1060 | 381401699 | | |
| | Neisseria bacilliformis ATCC BAA-1200 | 1077 | 329117879 | | |
| | Neisseria cinerea ATCC 14685 | 1082 | 261378287 | | |
| | Neisseria flavescens SK114 | 1081 | 241759613 | | |
| | Neisseria lactamica 020-06 | 1082 | 313669044 | | |
| | Neisseria meningitidis 053442 | 1082 | 161869390 | | |
| | Neisseria meningitidis 2007056 | 1082 | 433531983 | | |
| | Neisseria meningitidis 63049 | 1082 | 433514137 | | |
| | Neisseria meningitidis 8013 | 1082 | 385324780 | | |
| | Neisseria meningitidis 92045 | 1082 | 421559784 | | |
| | Neisseria meningitidis 93003 | 1081 | 421538794 | | |
| | Neisseria meningitidis 93004 | 1081 | 421541126 | | |
| | Neisseria meningitidis 96023 | 1082 | 433518260 | | |
| | Neisseria meningitidis 98008 | 1081 | 421555531 | | |
| | Neisseria meningitidis alphal4 | 1082 | 254804356 | | |
| | Neisseria meningitidis alpha275 | 1082 | 254672046 | | |
| | Neisseria meningitidis ATCC 13091 | 1082 | 304388355 | | |
| | Neisseria meningitidis N1568 | 1081 | 416164244 | | |
| | Neisseria meningitidis NM140 | 1081 | 421545139 | | |
| | Neisseria meningitidis NM220 | 1082 | 418291220 | | |
| | Neisseria meningitidis NM233 | 1082 | 418288950 | | |
| | Neisseria meningitidis WUE 2594 | 1082 | 385337435 | | |
| | Neisseria meningitidis Z2491 | 1082 | 218767588 | 218767587 | |
| | Neisseria sp. oral taxon 14 str. F0314 | 1089 | 298369677 | | |
| | Neisseria wadsworthii 9715 | 1097 | 350570326 | | |
| | Pasteurella multocida subsp. gallicida X73 | 1058 | 425063822 | | |
| | Pasteurella multocida subsp. multocida str. | 1056 | 421263876 | | |
| | P52VAC | | | | |
| | Pasteurella multocida subsp. multocida str. | 1056 | 15602992 | 15602991 | |
| | Pm70 | | | | |
| | Simonsiella muelleri ATCC 29453 | 1063 | 404379108 | | |
| 5 | Lactobacillus brevis subsp. gravesensis ATCC | 1377 | 227509761 | | Type II-A |
| | 27305 | | | | |
| | Lactobacillus buchneri CD034 | 1371 | 406027703 | | |
| | Lactobacillus buchneri NRRL B-30929 | 1371 | 331702228 | | |
| | Lactobacillus casei BL23 | 1361 | 191639137 | | |
| | Lactobacillus casei Lc-10 | 1361 | 418010298 | | |
| | Lactobacillus casei M36 | 1363 | 417996992 | | |
| | Lactobacillus casei str. Zhang | 1361 | 301067199 | | |
| | Lactobacillus casei T71499 | 1360 | 417999832 | | |
| | Lactobacillus casei UCD174 | 1366 | 418002962 | | |
| | Lactobacillus casei W56 | 1389 | 409997999 | | |
| | Lactobacillus coryniformis subsp. coryniformis | 1354 | 333394446 | | |
| | KCTC 3167 | | | | |
| | Lactobacillus curvatus CRL 705 | 1368 | 354808135 | | |
| | Lactobacillus fermentum 28-3-CHN | 1313 | 260662220 | | |
| | Lactobacillus fermentum ATCC 14931 | 1381 | 227514633 | | |
| | Lactobacillus florum 2F | 1327 | 408790128 | | |
| | Lactobacillus gasseri JV-V03 | 1391 | 300361537 | | |
| | Lactobacillus hominis CRBIP 24.179 | 1386 | 395244248 | | |
| | Lactobacillus jensenii 269-3 | 1391 | 238854567 | | |
| | Lactobacillus jensenii 27-2-CHN | 1395 | 256852176 | | |
| | Lactobacillus johnsonii DPC 6026 | 1375 | 385826041 | | |
| | Lactobacillus mucosae LM1 | 1382 | 377831443 | | |
| | Lactobacillus paracasei subsp. paracasei 8700:2 | 1362 | 239630053 | | |
| | Lactobacillus pentosus IG1 | 1382 | 339637353 | | |
| | Lactobacillus pentosus KCA1 | 1361 | 392947436 | | |
| | Lactobacillus pentosus MP-10 | 1358 | 334881121 | | |
| | Lactobacillus plantarum ZJ316 | 1358 | 448819853 | | |
| | Lactobacillus rhamnosus GG | 1363 | 258509199 | 258509198 | |
| | Lactobacillus rhamnosus HN001 | 1361 | 199597394 | | |
| | Lactobacillus rhamnosus R0011 | 1361 | 418072660 | | |
| | Lactobacillus ruminis ATCC 25644 | 1375 | 323340068 | | |
| | Lactobacillus salivarius SMXD51 | 1339 | 418960525 | | |
| | Lactobacillus sanfranciscensis TMW 1.1304 | 1331 | 347534532 | | |
| | Lactobacillus sp. 66c | 1419 | 408410332 | | |
| | Pediococcus acidilactici DSM 20284 | 1364 | 304386254 | | |
| | Pediococcus acidilactici MA18/5M | 1366 | 418068659 | | |
| | Psychroflexus torquis ATCC 700755 | 1509 | 408489713 | | |
| 6 | Anaerophaga sp. HS1 | 1552 | 371776944 | | Type II-C |
| | Anaerophaga thermohalophila DSM 12881 | 1515 | 346224232 | | |
| | Bacteroides coprophilus DSM 18228 | 1509 | 224026357 | | |
| | Bacteroides coprosuis DSM 18011 | 1504 | 333031006 | | |
| | Bacteroides dorei DSM 17855 | 1504 | 212694363 | | |
| | Bacteroides eggerthii 1_2_48FAA | 1509 | 317474201 | | |
| | Bacteroides faecis 27-5 | 1526 | 380696107 | | |
| | Bacteroides fluxus YIT 12057 | 1509 | 329965125 | | |
| | Bacteroides nordii CL02T12C05 | 1512 | 393788929 | | |
| | Bacteroides sp. 20_3 | 1517 | 301311869 | 301311870 | |
| | Bacteroides sp. D2 | 1510 | 383115507 | | |
| | Bacteroides uniformis CL03T00C23 | 1508 | 423303159 | | |
| | Bacteroides vulgatus CL09T03C04 | 1504 | 423312075 | | |
| | Capnocytophaga gingivalis ATCC 33624 | 1436 | 228473057 | | |
| | Capnocytophaga sp. CM59 | 1437 | 402830627 | | |
| | Capnocytophaga sp. oral taxon 324 str. F0483 | 1471 | 429756885 | | |
| | Capnocytophaga sp. oral taxon 326 str. F0382 | 1450 | 429752492 | | |
| | Capnocytophaga sp. oral taxon 412 str. F0487 | 1450 | 393778597 | | |
| | Chryseobacterium sp. CF314 | 1419 | 399023756 | | |
| | Fibrobacter succinogenes subsp. succinogenes | 1512 | 261414553 | | |
| | S85 | | | | |
| | Flavobacteriaceae bacterium S85 | 1516 | 372210605 | | |
| | Flavobacterium columnare ATCC 49512 | 1459 | 365960762 | | |
| | Fluviicola taffensis DSM 16823 | 1458 | 327405121 | | |
| | Mucilaginibacter paludis DSM 18603 | 1473 | 373954054 | | |
| | Myroides odoratus DSM 2801 | 1466 | 374597806 | | |
| | Omithobacterium rhinotracheale DSM 15997 | 1535 | 392391493 | | |
| | Prevotella bivia JCVIHMP010 | 1485 | 282858617 | | |
| | Prevotella buccae ATCC 33574 | 1457 | 315607525 | | |
| | Prevotella nigrescens ATCC 33563 | 1506 | 340351024 | | |
| | Prevotella sp. MSX73 | 1483 | 402307189 | | |
| | Prevotella timonensis CRIS 5C-B1 | 1487 | 282881485 | | |
| | Prevotella veroralis F0319 | 1496 | 260592128 | | |
| | Sphingobacterium spiritivorum ATCC 33861 | 1426 | 300771242 | | |
| | Weeksella virosa DSM 16922 | 1440 | 325955459 | | |
| 7 | Bacteroides fragilis 638R | 1436 | 375360193 | | Type II-C |
| | Bacteroides fragilis NCTC 9343 | 1436 | 60683389 | 60683388 | |
| | Bacteroides sp. 2_1_16 | 1436 | 265767599 | | |
| | Bacteroides sp. 3_1_19 | 1424 | 298377533 | | |
| | Bacteroides sp. D2 | 1436 | 383110723 | | |
| | Bacteroidetes oral taxon 274 str. F0058 | 1434 | 298373376 | | |
| | Belliella baltica DSM 15883 | 1352 | 390944707 | | |
| | Bergeyella zoohelcum CCUG 30536 | 1430 | 406673990 | | |
| | Capnocytophaga canimorsus Cc5 | 1430 | 340622236 | | |
| | Capnocytophaga ochracea DSM 7271 | 1426 | 256819408 | | |
| | Capnocytophaga sp. oral taxon 329 str. F0087 | 1435 | 332882466 | | |
| | Capnocytophaga sp. oral taxon 335 str. F0486 | 1426 | 420149252 | | |
| | Capnocytophaga sp. oral taxon 380 str. F0488 | 1432 | 429748017 | | |
| | Capnocytophaga sputigena Capno | 1426 | 213962376 | | |
| | Flavobacterium psychrophilum JIP02/86 | 1354 | 150025575 | | |
| | Galbibacter sp.ck-I2-15 | 1391 | 408370397 | | |
| | Indibacter alkaliphilus LW1 | 1354 | 404451234 | | |
| | Joostella marina DSM 19592 | 1397 | 386818981 | | |
| | Kordia algicida OT-1 | 1391 | 163754820 | | |
| | Marinilabilia sp. AK2 | 1345 | 410030899 | | |
| | Myroides injenensis M09-0166 | 1401 | 399927444 | | |
| | Niabella soli DSM 19437 | 1426 | 374372722 | | |
| | Parabacteroides johnsonii DSM 18315 | 1443 | 218258638 | | |
| | Parabacteroides sp. D13 | 1424 | 256840409 | | |
| | Prevotella histicola F0411 | 1375 | 357042839 | | |
| | Prevotella intermedia 17 | 1380 | 387132277 | | |
| | Prevotella nigrescens F0103 | 1380 | 445119230 | | |
| | Prevotella oralis ATCC 33269 | 1391 | 323344874 | | |
| | Prevotella sp. oral taxon 306 str. F0472 | 1375 | 383811446 | | |
| | Riemerella anatipestifer RA-CH-1 | 1405 | 407451859 | | |
| | Riemerella anatipestifer RA-GD | 1400 | 386321727 | | |
| | Zunongwangia profunda SM-A87 | 1388 | 295136244 | | |
| 8 | Actinomyces coleocanis DSM 15436 | 1105 | 227494853 | | Type II-C |
| | Actinomyces georgiae F0490 | 1113 | 420151340 | | |
| | Actinomyces naeslundii str. Howell 279 | 1101 | 400293272 | | |
| | Actinomyces sp. ICM47 | 1144 | 396585058 | | |
| | Actinomyces sp. oral taxon 175 str. F0384 | 1095 | 343523232 | | |
| | Actinomyces sp. oral taxon 181 str. F0379 | 1103 | 429758968 | | |
| | Actinomyces sp. oral taxon 848 str. F0332 | 1120 | 269219760 | | |
| | Actinomyces turicensis ACS-279-V-Col4 | 1114 | 405979650 | | |
| | Bifidobacterium dentium Bd1 | 1138 | 283456135 | | |
| | Bifidobacterium longum DJO10A | 1187 | 189440764 | 189440765 | |
| | Bifidobacterium longum subsp. longum 2-28 | 1124 | 419852381 | | |
| | Bifidobacterium longum subsp. longum KACC | 1138 | 384200944 | | |
| | 91563 | | | | |
| | Bifidobacterium sp. 12_1_47BFAA | 1151 | 317482066 | 317482065 | |
| | Corynebacterium accolens ATCC 49725 | 1099 | 227502575 | | |
| | Corynebacterium accolens ATCC 49726 | 1099 | 306835141 | | |
| | Corynebacterium diphtheriae 241 | 1084 | 375289763 | | |
| | Corynebacterium diphtheriae 31A | 1084 | 376283539 | | |
| | Corynebacterium diphtheriae BH8 | 1084 | 376286566 | | |
| | Corynebacterium diphtheriae bv. intermedius str. | 1084 | 419861895 | | |
| | NCTC 5011 | | | | |
| | Corynebacterium diphtheriae C7 (beta) | 1084 | 376289243 | | |
| | Corynebacterium diphtheriae HC02 | 1084 | 376292154 | | |
| | Corynebacterium diphtheriae NCTC 13129 | 1084 | 38232678 | | |
| | Corynebacterium diphtheriae VA01 | 1084 | 376256051 | | |
| | Corynebacterium matruchotii ATCC 14266 | 1089 | 305681510 | | |
| | Corynebacterium matruchotii ATCC 33806 | 1069 | 225021644 | | |
| | Gardnerella vaginalis 1500E | 1186 | 415717744 | | |
| | Gardnerella vaginalis 284V | 1186 | 415703177 | | |
| | Gardnerella vaginalis 5-1 | 1186 | 298252606 | | |
| | Mobiluncus curtisii subsp. holmesii ATCC 35242 | 1123 | 315656340 | | |
| | Mobiluncus mulieris 28-1 | 1091 | 269977848 | | |
| | Mobiluncus mulieris FB024-16 | 1091 | 307700167 | | |
| | Scardovia inopinata F0304 | 1178 | 294790575 | | |
| 9 | Bacillus cereus BAG4X12-1 | 1068 | 423439645 | | Type II-C |
| | Bacillus cereus BAG4X2-1 | 1078 | 423445130 | | |
| | Bacillus cereus Rock1-15 | 1069 | 229113166 | | |
| | Bacillus smithii 7_3_47FAA | 1088 | 365156657 | 365156658 | |
| | Bacillus thuringiensis serovar finitimus YBT-020 | 1069 | 384183447 | | |
| | Brevibacillus laterosporus GI-9 | 1092 | 421874297 | 421874296 | |
| | Clostridium perfringens C str. JGS1495 | 1065 | 169343975 | | |
| | Clostridium perfringens D str. JGS1721 | 1065 | 182624245 | | |
| | Sporolactobacillus vineae DSM 21990 = SL153 | 1084 | 404330915 | | |
| 10 | Gemella haemolysans ATCC 10379 | 1392 | 241889924 | | Type II-A |
| | Gemella morbillorum M424 | 1385 | 317495358 | | |
| | Megasphaera sp. UPII 135-E | 1352 | 342218215 | | |
| | Veillonella atypica ACS-134-V-Col7a | 1398 | 303229466 | 303229394 | |
| | Veillonella parvula ATCC 17745 | 1398 | 282849530 | | |
| | Veillonella sp. 6_1_27 | 1395 | 294792465 | | |
| | Veillonella sp. oral taxon 780 str. F0422 | 1120 | 342213964 | | |
| 11 | Treponema denticola AL-2 | 1395 | 449103686 | | Type II-A |
| | Treponema denticola ASLM | 1395 | 449106292 | | |
| | Treponema denticola ATCC 35405 | 1395 | 42525843 | 42525844 | |
| | Treponema denticola H1-T | 1395 | 449118593 | | |
| | Treponema denticola H-22 | 1395 | 449117322 | | |
| | Treponema denticola OTK | 1395 | 449125136 | | |
| | Treponema denticola SP37 | 1395 | 449130155 | | |
| 12 | Mycoplasma canis PG 14 | 1233 | 384393286 | 384393287 | Type II-A |
| | Mycoplasma canis PG 14 | 1233 | 419703974 | | |
| | Mycoplasma canis UF31 | 1233 | 384937953 | | |
| | Mycoplasma canis UF33 | 1233 | 419704625 | | |
| | Mycoplasma canis UFG1 | 1233 | 419705269 | | |
| | Mycoplasma canis UFG4 | 1233 | 419705920 | | |
| | Mycoplasma cynos C142 | 1239 | 433625054 | | |
| 13 | Enterococcus faecalis Fly1 | 1150 | 257084992 | | Type II-A |
| | Enterococcus faecalis R508 | 1150 | 424761124 | | |
| | Enterococcus faecalis T11 | 1150 | 257419486 | | |
| | Enterococcus faecalisTX0012 | 1150 | 315149830 | 315149831 | |
| | Enterococcus faecalis TX0012 | 1150 | 422729710 | | |
| | Enterococcus faecalis TX1342 | 1150 | 422701955 | | |
| | Facklamia hominis CCUG 36813 | 1142 | 406671118 | | |
| 14 | Gluconacetobacter diazotrophicus PAI 5 | 1003 | 209542524 | | Type II-C |
| | Gluconacetobacter diazotrophicus PAI 5 | 1050 | 162147907 | | |
| | Methylocystis sp. ATCC 49242 | 1080 | 323139312 | | |
| | Methylosinus trichosporium OB3b | 1082 | 296446027 | 296446028 | |
| | Rhodopseudomonas palustris BisB18 | 1066 | 90425961 | | |
| | Rhodopseudomonas palustris BisB5 | 1064 | 91975509 | | |
| | Tistrella mobilis KA081020-065 | 1049 | 389874754 | | |
| 15 | Francisella cf. novicida 3523 | 1646 | 387824704 | | Type II-B |
| | Francisella cf. novicida Fx1 | 1629 | 385792694 | | |
| | Francisella novicida FTG | 1629 | 208779141 | | |
| | Francisella novicida GA99-3548 | 1629 | 254374175 | | |
| | Francisella novicida U112 | 1629 | 118497352 | 118497353 | |
| | Francisella tularensis subsp. novicida GA99- | | | | |
| | 3549 | 1629 | 254372717 | | |
| 16 | Acidovorax avenae subsp. avenae ATCC 19860 | 1045 | 326315085 | | Type II-C |
| | Alicycliphilus denitrificans BC | 1029 | 319760940 | | |
| | Alicycliphilus denitrificans K601 | 1029 | 330822845 | 330822846 | |
| | gamma proteobacterium HdN1 | 1025 | 304313029 | | |
| | Nitrosomonas sp. AL212 | 1044 | 325983496 | | |
| | Verminephrobacter eiseniae EF01-2 | 1068 | 121608211 | | |
| 17 | Mycoplasma gallisepticum NC95_13295-2-2P | 1269 | 401767318 | | Type II-A |
| | Mycoplasma gallisepticum NY01_2001.047-5-1P | 1224 | 401768851 | | |
| | Mycoplasma gallisepticum str. F | 1269 | 284931710 | 284931711 | |
| | Mycoplasma gallisepticum str. F | 1269 | 385326554 | | |
| | Mycoplasma gallisepticum str. R(low) | 1270 | 294660600 | | |
| 18 | Prevotella buccalis ATCC 35310 | 1218 | 282878504 | | Type II-C |
| | Prevotella ruminicola 23 | 1204 | 294674019 | | |
| | Prevotella stercorea DSM 18206 | 1216 | 359406728 | | |
| | Prevotella tannerae ATCC 51259 | 1234 | 258648111 | | |
| | Prevotella timonensis CRIS 5C-B1 | 1218 | 282880052 | 282880053 | |
| 19 | Phascolarctobacterium succinatutens YIT 12067 | 1087 | 323142435 | | Type II-C |
| | Roseburia intestinalis L1-82 | 1140 | 257413184 | | |
| | Roseburia intestinalis M50/1 | 1128 | 291537230 | | |
| | Roseburia inulinivorans DSM 16841 | 1152 | 225377804 | 225377803 | |
| | Subdoligranulum sp. 4_3_54A2FAA | 1084 | 365132400 | | |
| 20 | Coriobacterium glomerans PW2 | 1384 | 328956315 | 328956316 | Type II-A |
| | Eggerthella sp. YY7918 | 1380 | 339445983 | | |
| | Gordonibacter pamelaeae 7-10-1-b | 1371 | 295106015 | | |
| | Olsenella uli DSM 7084 | 1399 | 302336020 | | |
| 21 | Fusobacterium nucleatum subsp. vincentii | 1374 | 34762592 | 34762593 | Type II-A |
| | ATCC 49256 | | | | |
| | Fusobacterium sp. 1_1_41FAA | 1367 | 294782278 | | |
| | Fusobacterium sp. 3_1_27 | 1367 | 294785695 | | |
| | Fusobacterium sp. 3_1_36A2 | 1367 | 256845019 | 256845020 | |
| 22 | Finegoldia magna ACS-171-V-Col3 | 1347 | 302380288 | | Type II-A |
| | Finegoldia magna ATCC 29328 | 1348 | 169823755 | 169823756 | |
| | Finegoldia magna SY403409CC001050417 | 1348 | 417926052 | | |
| | Helcococcus kunzii ATCC 51366 | 1338 | 375092427 | | |
| 23 | Prevotella denticola CRIS 18C-A | 1422 | 325859619 | | Type II-C |
| | Prevotella micans F0438 | 1425 | 373501184 | | |
| | Prevotella sp. C561 | 1424 | 345885718 | 345885719 | |
| 24 | Leuconostoc gelidum KCTC 3527 | 1355 | 333398273 | | Type II-A |
| | Oenococcus kitaharae DSM 17330 | 1389 | 366983953 | 366983954 | |
| | Oenococcus kitaharae DSM 17330 | 1389 | 372325145 | | |
| 25 | Anaerococcus tetradius ATCC 35098 | 1361 | 227501312 | | Type II-A |
| | Lactobacillus iners LactinV 11V1-d | 1369 | 309803917 | | |
| | Peptoniphilus duerdenii ATCC BAA-1640 | 1364 | 304438954 | 304438953 | |
| 26 | Coprococcus catus GD/7 | 1338 | 291520705 | 291520706 | Type II-A |
| | Dorea longicatena DSM 13814 | 1340 | 153855454 | | |
| | Ruminococcus lactaris ATCC 29176 | 1341 | 197301447 | | |
| 27 | Staphylococcus pseudintermedius ED99 | 1334 | 323463801 | 323463802 | Type II-A |
| | Staphylococcus pseudintermedius ED99 | 1334 | 386318630 | | |
| | Staphylococcus simulans ACS-120-V-Sch 1 | 1112 | 414160476 | | |
| 28 | Dinoroseobacter shibae DFL 12 | 1079 | 159042956 | 159042957 | Type II-C |
| | Sphingobium sp. AP49 | 1110 | 398385143 | | |
| | Sphingomonas sp. S17 | 1090 | 332188827 | | |
| 29 | Flavobacterium branchiophilum FL-15 | 1473 | 347536497 | no cas1 | Type II-C |
| | Flavobacterium columnare ATCC 49512 | 1535 | 365959402 | | |
| 30 | Bifidobacterium bifidum S17 | 1420 | 310286728 | 310286727 | Type II-A |
| | Scardovia wiggsiae F0424 | 1471 | 423349694 | | |
| 31 | Burkholderiales bacterium 1_1_47 | 1428 | 303257695 | | Tvoe II-B |
| | Parasutterella excrementihominis YIT 11859 | 1428 | 331001027 | 331001028 | |
| 32 | Streptococcus sanguinis SK49 | 1421 | 422884106 | 422884107 | Type II-A |
| | Streptococcus sp. oral taxon 71 str. 73H25AP | 1420 | 306826314 | | |
| 33 | Eubacterium sp. AS15 | 1391 | 402309258 | | Type II-A |
| | Eubacterium yurii subsp. margaretiae ATCC | 1391 | 306821691 | 306821690 | |
| | 43715 | | | | |
| 34 | Legionella pneumophila 130b | 1372 | 307608922 | | Type II-B |
| | Legionella pneumophila str. Paris | 1372 | 54296138 | 54296139 | |
| 35 | Acidaminococcus intestini RyC-MR95 | 1358 | 352684361 | | Type II-A |
| | Acidaminococcus sp. D21 | 1358 | 227824983 | 227824982 | |
| 36 | Lactobacillus farciminis KCTC 3681 | 1356 | 336394882 | 336394883 | Type II-A |
| | Lactobacillus versmoldensis KCTC 3814 | 1289 | 365906066 | | |
| 37 | Mycoplasma synoviae 53 | 1304 | 144575181 | | Type II-A |
| | Mycoplasma synoviae 53 | 1314 | 71894592 | 71894593 | |
| 38 | Elusimicrobium minutum Pei191 | 1195 | 187250660 | 187250661 | Type II-C |
| | uncultured Termite group 1 bacterium phylotype | 1032 | 189485059 | | |
| | Rs-D17 | | | | |
| 39 | Clostridium spiroforme DSM 1552 | 1116 | 169349750 | | Type II-A |
| | Eubacterium dolichum DSM 3991 | 1096 | 160915782 | 160915783 | |
| 40 | Eubacterium rectale ATCC 33656 | 1114 | 238924075 | 238924076 | Type II-A |
| | Eubacterium ventriosum ATCC 27560 | 1107 | 154482474 | | |
| 41 | Staphylococcus aureus subsp. aureus | 1053 | 403411236 | | Type II-A |
| | Staphylococcus lugdunensis M23590 | 1054 | 315659848 | 315659847 | |
| 42 | Ignavibacterium album JCM 16511 | 1688 | 385811609 | 385811610 | Type II-C |
| 43 | Odoribacter laneus YIT 12061 | 1498 | 374384763 | 374384762 | Type II-C |
| 44 | Caenispirillum salinarum AK4 | 1442 | 427429481 | 427429479 | Type II-C |
| 45 | Sutterella wadsworthensis 3_1_45B | 1422 | 319941583 | 319941582 | Type II-B |
| 46 | Bergeyella zoohelcum ATCC 43767 | 1415 | 423317190 | 423317188 | Type II-C |
| 47 | Wolinella succinogenes DSM 1740 | 1409 | 34557932 | 34557933 | Type II-B |
| 48 | gamma proteobacterium HTCC5015 | 1397 | 254447899 | no cas1 | Type II-B |
| 49 | Filifactor alocis ATCC 35896 | 1365 | 374307738 | 374307737 | Type II-A |
| 50 | Planococcus antarcticus DSM 14505 | 1333 | 389815359 | 389815358 | Type II-A |
| 51 | Catenibacterium mitsuokai DSM 15897 | 1329 | 224543312 | 224543313 | Type II-A |
| 52 | Solobacterium moorei F0204 | 1327 | 320528778 | 320528779 | Type II-A |
| 53 | Fructobacillus fructosus KCTC 3544 | 1323 | 339625081 | 339625080 | Type II-A |
| 54 | Mycoplasma ovipneumoniae SC1 | 1265 | 363542550 | 363542551 | Type II-A |
| 54 | Streptobacillus moniliformis DSM 12112 | 1259 | 269123826 | | |
| 55 | Mycoplasma mobile 163K | 1236 | 47458868 | 47458867 | Type II-A |
| 56 | Porphyromonas sp. oral taxon 279 str. F0450 | 1197 | 402847315 | 402847305 | Type II-C |
| 57 | Actinomyces sp. oral taxon 180 str. F0310 | 1181 | 315605738 | 315605739 | Type II-C |
| 58 | Sphaerochaeta globus str. Buddy | 1179 | 325972003 | 325972002 | Type II-C |
| 59 | Rhodospirillum rubrum ATCC 11170 | 1173 | 83591793 | 83591790 | Type II-C |
| 60 | Azospirillum sp. B510 | 1168 | 288957741 | 288957738 | Type II-C |
| 61 | Nitrobacter hamburgensis X14 | 1166 | 92109262 | no cas1 | Type II-C |
| 62 | Ruminococcus albus 8 | 1156 | 325677756 | 325677757 | Type II-C |
| 63 | Barnesiella intestinihominis YIT 11860 | 1153 | 404487228 | 404487227 | Type II-C |
| 64 | Alicyclobacillus hesperidum URH17-3-68 | 1146 | 403744858 | 403744859 | Type II-C |
| 65 | Acidothermus cellulolyticus 11B | 1138 | 117929158 | 117929157 | Type li-C |
| 66 | Nitratifractor salsuginis DSM 16511 | 1132 | 319957206 | 319957207 | Type II-C |
| 67 | Acidovorax ebreus TPSY | 1131 | 222109285 | 222109284 | Type II-C |
| 67 | Francisella tularensis subsp. tularensis WY96- | 1125 | 134302318 | | |
| | 3418 | | | | |
| 68 | Lactobacillus coryniformis subsp. torquens | 1119 | 336393381 | 336393380 | Type II-C |
| | KCTC 3535 | | | | |
| 69 | Alcanivorax sp. W11-5 | 1113 | 407803669 | 407803668 | Type II-C |
| 70 | Akkermansia muciniphila ATCC BAA-835 | 1101 | 187736489 | 187736488 | Type II-C |
| 71 | Ilyobacter polytropus DSM 2926 | 1092 | 310780384 | 310780383 | Type II-C |
| 72 | Bradyrhizobium sp. BTAi1 | 1064 | 148255343 | no cas1 | Type II-C |
| 73 | Ralstonia syzygii R24 | 1062 | 344171927 | 344171926 | Type II-C |
| 74 | Treponema sp. JC4 | 1062 | 384109266 | 384109265 | Type II-C |
| 75 | Wolinella succinogenes DSM 1740 | 1059 | 34557790 | 34557789 | Type II-C |
| 76 | Rhodovulum sp. PH10 | 1059 | 402849997 | 402849996 | Type II-C |
| 77 | Aminomonas paucivorans DSM 12260 | 1052 | 312879015 | 312879014 | Type II-C |
| 77 | Bacteroides sp 3_1_33FAA | 1055 | 265750948 | | |
| 78 | Parvibaculum lavamentivorans DS-1 | 1037 | 154250555 | 154250554 | Type II-C |
| 79 | Candidatus Puniceispirillum marinum | 1035 | 294086111 | 294086112 | Type II-C |
| | IMCC1322 | | | | |
| 80 | Blastopirellula marina DSM 3645 | 1027 | 87307579 | | |
| 80 | Helicobacter mustelae 12198 | 1024 | 291276265 | 291276264 | Type II-C |
| 81 | Clostridium cellulolyticum H10 | 1021 | 220930482 | 220930481 | Type II-C |
| 82 | Lactobacillus crispatus FB077-07 | 857 | 423321767 | | |
| 82 | uncultured delta proteobacterium | 1011 | 297182908 | no cas1 | Type II-C |
| | HF0070_07E19 | | | | |
| | Acetobacter aceti NBRC 14818 | 240 | 340779894 | | |
| | Acetobacter aceti NBRC 14818 | 376 | 340779669 | | |
| | Acetobacter aceti NBRC 14818 | 400 | 340779439 | | |
| | Actinobacillus ureae ATCC 25976 | 239 | 322514756 | | |
| | Actinobacillus ureae ATCC 25976 | 400 | 322514772 | | |
| | Bacillus cereus BAG2X1-3 | 333 | 423408783 | | |
| | Bacteroides cellulosilyticus DSM 14838 | 206 | 224535831 | | |
| | Bacteroides cellulosilyticus DSM 14838 | 1219 | 224535832 | | |
| | Bacteroides coprosuis DSM 18011 | 349 | 333031028 | | |
| | Bacteroides oleiciplenus YIT 12058 | 653 | 427387687 | | |
| | Bacteroides oleiciplenus YIT 12058 | 779 | 427387686 | | |
| | Bacteroides sp. 9_1_42FAA | 1055 | 237710146 | | |
| | Bacteroides uniformis CL03T12C37 | 286 | 423308124 | | |
| | Bacteroides uniformis CL03T12C37 | 1210 | 423308121 | | |
| | Bifidobacterium bifidum IPLA 20015 | 1281 | 421736922 | | |
| | Bifidobacterium dentium ATCC 27678 | 1121 | 171742822 | | |
| | Bifidobacterium longum subsp. longum 1-6B | 182 | 419848319 | | |
| | Bifidobacterium longum subsp. longum 1-6B | 354 | 419847807 | | |
| | Bifidobacterium longum subsp. longum 1-6B | 441 | 419848320 | | |
| | Bifidobacterium longum subsp. longum 44B | 166 | 419856168 | | |
| | Bifidobacterium longum subsp. longum 44B | 967 | 419856216 | | |
| | Butyrivibrio fibrisolvens 16/4 | 103 | 291518094 | | |
| | Butyrivibrio fibrisolvens 16/4 | 177 | 291518096 | | |
| | Butyrivibrio fibrisolvens 16/4 | 765 | 291518097 | | |
| | Campylobacter coli 2685 | 933 | 419548338 | | |
| | Campylobacter jejuni subsp. jejuni 2008-894 | 666 | 419652996 | | |
| | Campylobacter jejuni subsp. jejuni 305 | 190 | 317510779 | | |
| | Campylobacter jejuni subsp. jejuni 305 | 759 | 317510780 | | |
| | Campylobacter jejuni subsp. jejuni 327 | 462 | 415747744 | | |
| | Campylobacter jejuni subsp. jejuni 327 | 512 | 415747743 | | |
| | Campylobacter jejuni subsp. jejuni CG8421 | 721 | 205356639 | | |
| | Campylobacter jejuni subsp. jejuni M1 | 861 | 384442103 | | |
| | candidate division TM7 single-cell isolate TM7c | 372 | 167957190 | | |
| | Capnocytophaga ochracea F0287 | 303 | 315224863 | | |
| | Capnocytophaga ochracea F0287 | 1117 | 315224862 | | |
| | Coprococcus comes ATCC 27758 | 686 | 226325213 | | |
| | Diplosphaera colitermitum TAV2 | 210 | 225164109 | | |
| | Enterococcus fecalis TX1467 | 921 | 422867931 | | |
| | Enterococcus fecalis TX4248 | 936 | 307270261 | | |
| | Enterococcus faecium E2620 | 892 | 431752788 | | |
| | Enterococcus sp. 7L76 | 116 | 295113136 | | |
| | Francisella tularensis subsp. holarctica 257 | 878 | 254367943 | | |
| | Francisella tularensis subsp. holarctica FSC022 | 158 | 254369498 | | |
| | Francisella tularensis subsp. holarctica FSC022 | 244 | 254369502 | | |
| | Francisella tularensis subsp. holarctica FSC022 | 292 | 254369497 | | |
| | Francisella tularensis subsp. holarctica FSC022 | 393 | 254369499 | | |
| | Francisella tularensis subsp. holarctica FSC022 | 501 | 254369496 | | |
| | Francisella tularensis subsp. holarctica LVS | 158 | 89256630 | | |
| | Francisella tularensis subsp. holarctica LVS | 393 | 89256631 | | |
| | Francisella tularensis subsp. holarctica URTF1 | 53 | 290953529 | | |
| | Francisella tularensis subsp. holarctica URTF1 | 285 | 290953528 | | |
| | Francisella tularensis subsp. holarctica SCHU | 1123 | 56707712 | | |
| | S4 | | | | |
| | Gemella haemolysans M341 | 1258 | 329766883 | | |
| | Haemophilus pittmaniae HK 85 | 121 | 343519651 | | |
| | Haemophilus pittmaniae HK 85 | 203 | 343519677 | | |
| | Haemophilus pittmaniae HK 85 | 650 | 343519679 | | |
| | Helicobacter hepaticus ATCC 51449 | 131 | 32266975 | | |
| | Helicobacter pollorum MIT 98-5489 | 344 | 242308998 | | |
| | Helicobacter pollorum MIT 98-5489 | 702 | 242309214 | | |
| | Kingella kingae ATCC 23330 | 1000 | 333374624 | | |
| | Lactobacillus buchneri ATCC 11577 | 1239 | 227512703 | | |
| | Lactobacillus casei 21/1 | 234 | 417984225 | | |
| | Lactobacillus casei 21/1 | 1128 | 417984226 | | |
| | Lactobacillus casei CRF28 | 566 | 417994652 | | |
| | Lactobacillus casei CRF28 | 700 | 417993346 | | |
| | Lactobacillus casei UW1 | 315 | 418005912 | | |
| | Lactobacillus casei UW1 | 330 | 418005913 | | |
| | Lactobacillus casei UW1 | 412 | 418005908 | | |
| | Lactobacillus casei UW4 | 236 | 418008739 | | |
| | Lactobacillus casei UW4 | 330 | 418008740 | | |
| | Lactobacillus crispatus 214-1 | 534 | 293381764 | | |
| | Lactobacillus crispatus CTV-05 | 298 | 312978192 | | |
| | Lactobacillus crispatus FB049-03 | 206 | 423318602 | | |
| | Lactobacillus crispatus FB049-03 | 347 | 423318603 | | |
| | Lactobacillus crispatus FB049-03 | 857 | 423318600 | | |
| | Lactobacillus crispatus JV-V01 | 278 | 227878395 | | |
| | Lactobacillus crispatus JV-V01 | 544 | 227878705 | | |
| | Lactobacillus crispatus MV-1A-US | 277 | 256850790 | | |
| | Lactobacillus crispatus MV-1A-US | 538 | 256850346 | | |
| | Lactobacillus crispatus MV-3A-US | 279 | 262048056 | | |
| | Lactobacillus delbrueckii subsp. bulgaricus 2038 | 544 | 385815564 | | |
| | Lactobacillus delbrueckii subsp. bulgaricus 2038 | 669 | 385815562 | | |
| | Lactobacillus iners LactinV 09V1-c | 255 | 309804524 | | |
| | Lactobacillus iners LactinV 09V1-c | 343 | 309804534 | | |
| | Lactobacillus iners LactinV 09V1-c | 447 | 309804536 | | |
| | Lactobacillus iners SPIN 2503V10-D | 270 | 309809475 | | |
| | Lactobacillus iners SPIN 2503V10-D | 667 | 309805480 | | |
| | Lactobacillus ruminis ATCC 25644 | 1352 | 417973941 | | |
| | Lactobacillus salivarius ACS-116-V-Col5a | 629 | 301259400 | | |
| | Lactobacillus salivarius CECT 5713 | 897 | 385839899 | | |
| | Lactobacillus salivarius UCC118 | 1149 | 90961083 | | |
| | Leptospira inadai serovar Lyme str. 10 | 125 | 398345609 | | |
| | Leptospira inadai serovar Lyme str. 10 | 418 | 398341884 | | |
| | Leptospira inadai serovar Lyme str. 10 | 907 | 398345610 | | |
| | Leuconostoc pseudomesenteroides 4882 | 468 | 399517481 | | |
| | Leuconostoc pseudomesenteroides 4882 | 883 | 399517482 | | |
| | Listeria ivanovii FSL F6-596 | 232 | 315301622 | | |
| | Listeria ivanovii FSL F6-596 | 849 | 315301624 | | |
| | Listeria monocytogenes FSL F2-208 | 782 | 422410878 | | |
| | Listeria monocytogenes FSL J1-208 | 300 | 255024093 | | |
| | Listeria seeligeri FSL N1-067 | 874 | 313631816 | | |
| | Listeria seeligeri FSL N1-067 | 874 | 422420175 | | |
| | Miritimibacter alkaliphilus HTCC2654 | 997 | 84685065 | | |
| | Mycoplasma iowae 695 | 226 | 350547050 | | |
| | Mycoplasma iowae 695 | 933 | 350546886 | | |
| | Neisseria lactamica ATCC 23970 | 408 | 269215119 | | |
| | Neisseria lactamica ATCC 23970 | 666 | 269215120 | | |
| | Neisseria lactamica Y92-1009 | 241 | 422110930 | | |
| | Neisseria lactamica Y92-1009 | 828 | 422110931 | | |
| | Neisseria meningitidis NM3001 | 67 | 421568320 | | |
| | Neisseria meningitidis NM3001 | 976 | 421568319 | | |
| | Neisseria mucosa C102 | 220 | 319639577 | | |
| | Neisseria sp. oral taxon 20 str. F0370 | 392 | 429743981 | | |
| | Neisseria sp. oral taxon 20 str. F0370 | 701 | 429743980 | | |
| | Neisseria subflava NJ9703 | 587 | 284799897 | | |
| | Nitritalea halalkaliphila LW7 | 79 | 390445315 | | |
| | Nitrobacter hamburgensis X14 | 641 | 92118334 | | |
| | Oribacterium sinus F0268 | 653 | 227873236 | | |
| | Parabacteroides merdae ATCC 43184 | 103 | 154493351 | | |
| | Parabacteroides merdae CL03T12C32 | 84 | 423346601 | | |
| | Parabacteroides merdae CL09T00C40 | 82 | 423723156 | | |
| | Pasteurella bettyae CCUG 2042 | 398 | 387770127 | | |
| | Pasteurella bettyae CCUG 2042 | 610 | 387770112 | | |
| | Pasteurella multocida subsp. multocida str. | 199 | 421253447 | | |
| | Anand1_bufallo | | | | |
| | Pasteurella multocida subsp. multocida str. | 53 | 421259752 | | |
| | Anand1_cattle | | | | |
| | Pasteurella multocida subsp. multocida str. | 63 | 421259756 | | |
| | Anand1_cattle | | | | |
| | Pasteurella multocida subsp. multocida str. | 134 | 421259749 | | |
| | Anand1_cattle | | | | |
| | Pediococcus acidilactici 7_4 | 1229 | 270290729 | | |
| | Pediococcus lolii NGRI 0510Q | 270 | 427443367 | | |
| | Pediococcus lolii NGRI 0510Q | 1016 | 427441502 | | |
| | Peptoniphilus sp. oral taxon 386 str. F0131 | 1341 | 299144352 | | |
| | Porphyromonas catoniea F0037 | 211 | 429741290 | | |
| | Porphyromonas catoniea F0037 | 1009 | 429741242 | | |
| | Prevotella denticola F0289 | 1218 | 327314511 | | |
| | Prevotella disiens FB035-09AN | 443 | 303235616 | | |
| | Prevotella disiens FB035-09AN | 795 | 303237415 | | |
| | Prevotella melaninogenica D18 | 1354 | 288802595 | | |
| | Prevotella multiformis DSM 16608 | 129 | 325268382 | | |
| | Prevotella multiformis DSM 16608 | 535 | 325268323 | | |
| | Prevotella oulorum F0390 | 691 | 345881543 | | |
| | Prevotella oulorum F0390 | 774 | 345881542 | | |
| | Prevotella saccharolytica F0055 | 242 | 429739781 | | |
| | Prevotella sp. oral taxon 317 str. F0108 | 593 | 288929745 | | |
| | Prevotella sp. oral taxon 317 str. F0108 | 1174 | 288930149 | | |
| | Prevotella sp. oral taxon 472 str. F0295 | 241 | 260910968 | | |
| | Prevotella sp. oral taxon 472 str. F0295 | 992 | 260910970 | | |
| | Pseudoramibacter alactolyticus ATCC 23263 | 586 | 315926102 | | |
| | Pseudoramibacter alactolyticus ATCC 23263 | 770 | 315920103 | | |
| | Rhizobium etii GR56 | 103 | 218671711 | | |
| | Riemerella anatipestifer ATCC 11845 = DSM | 1145 | 383485594 | | |
| | 15868 | | | | |
| | Sphingobacterium spiritivorum ATCC 33300 | 116 | 227540450 | | |
| | Sphingobacterium spiritivorum ATCC 33300 | 1306 | 227540451 | | |
| | Staphylococcus massiliensis S46 | 475 | 425737243 | | |
| | Staphylococcus massiliensis S46 | 581 | 425737242 | | |
| | Staphylococcus simulans ACS-120-V-Sch1 | 1112 | 410878248 | | |
| | Staphylococcus agalactiae 18RS21 | 773 | 76799343 | | |
| | Staphylococcus downei F0415 | 994 | 312866154 | | |
| | Staphylococcus dysgalactiae subsp. equisimilis | 538 | 417753185 | | |
| | SK1249 | | | | |
| | Staphylococcus dysgalactiae subsp. equisimilis | 1155 | 417926916 | | |
| | SK1250 | | | | |
| | Streptococcus mutans SA38 | 1229 | 449253007 | | |
| | Streptococcus mutans SA38 | 1229 | 449880497 | | |
| | Streptococcus oralis SK255 | 550 | 417794716 | | |
| | Streptococcus oralis SK255 | 670 | 417793840 | | |
| | Streptococcus pseudoporcinus SPIN 20026 | 1326 | 313890160 | | |
| | Streptococcus pyogenes M49 591 | 1052 | 56808315 | | |
| | Streptococcus sanguinis VMC66 | 1167 | 323351495 | | |
| | Streptococcus sp. BS35b | 93 | 401683465 | | |
| | Streptococcus sp. GMD4S | 206 | 419816637 | | |
| | Streptococcus sp. GMD4S | 317 | 419819606 | | |
| | Streptococcus thermophilus CNCM I-1630 | 302 | 418027683 | | |
| | Streptococcus thermophilus CNCM I-1630 | 595 | 418027684 | | |
| | Streptococcus thermophilus MTCC 5461 | 39 | 445389093 | | |
| | Streptococcus vestibularis F0396 | 97 | 312863468 | | |
| | Streptococcus vestibularis F0396 | 1038 | 312863582 | | |
| | Sutterella parvirubra YIT 11816 | 406 | 378822098 | | |
| | Sutterella parvirubra YIT 11816 | 951 | 378821885 | | |
| | Sutterella wadsworthensis 2_1_59BFAA | 389 | 422348538 | | |
| | Tannerella sp. 6_1_58FAA_CT1 | 976 | 365118488 | | |
| | Treponema denticola ATCC 33520 | 631 | 449107910 | | |
| | Treponema denticola ATCC 33520 | 769 | 449107911 | | |
| | Treponema denticola F0402 | 357 | 422340642 | | |
| | Treponema denticola F0402 | 370 | 422340641 | | |
| | Treponema denticola F0402 | 631 | 422340640 | | |
| | Treponema phagendenis F0401 | 591 | 320536383 | | |
| | Treponema phagendenis F0401 | 738 | 320536384 | | |
| | Treponema vincentii ATCC 35580 | 281 | 257456747 | | |
| | Treponema vincentii ATCC 35580 | 992 | 257456748 | | |
| | uncultured bacterium | 600 | 406975829 | | |
| | uncultured bacterium | 1017 | 406999582 | | |
| | uncultured bacterium T3_7_42578 | 675 | 411001094 | | |
| | uncultured Termite group 1 bacterium phylotype | 166 | 189485058 | | |
| | Rs-D17 | | | | |
| | uncultured Termite group 1 bacterium phylotype | 1032 | 189485225 | | |
| | Rs-D17 | | | | |
| | Verminephrobacter aporrectodeae subsp. | 983 | 347820874 | | |
| | tuberculatae At4 | | | | |

^{a}Cas9 sequences are grouped according to the BLASTclust clustering program. Truncated sequences were not selected for the analysis and are listed at bottom of the table without any cluster number (see Materials and Methods).
^{b}Bacterial strains harboring cas9 gene orthologue are listed; GI, GenInfo Identifier. Bold, cluster representatives chosen for the alignment and tree reconstruction. Grey, discarded, incomplete Cas9 sequences (see Materials and Methods). Note, that the incomplete sequences were all confirmed to be truncated Cas9 orthologues due to the presence of conserved motifs and similarity to the other Cas9 orthologues.
^{c}Cas1 GenInfo Identifier of the representative sequences chosen for the alignment and tree reconstruction are given. Grey, discarded, incomplete sequences. When possible, alternative Cas1 sequence from the same cluster as the discarded Cas1 sequence was selected (clusters 8, 9 and 21, in bold).
^{d}Type II CRISPR subtype of the CRISPR loci of the Cas9 cluster as inferred from the representative Cas1 and Cas9 trees topology.

[0493] Analysis of the composition of cas genes, transcription direction of the CRISPR arrays with respect to that of the cas operon, and location and orientation of tracrRNAs resulted in the division of subtypes into groups with distinct locus characteristics, especially within the subtype II-A (FIG. 1, clusters marked with different colors) (15). We selected Cas9 enzymes representative of the major type II groups. Cas9 orthologs of S. pyogenes, S. thermophilus* (CRISPR3) and S. mutans were chosen for type II-A systems associated with shorter, ˜220 amino acid Csn2 variants (Csn2a). Cas9 of S. thermophilus** (CRISPR1) represents a distinct group of type II-A sequences associated with longer, ˜350 amino acid version of Csn2 orthologs (Csn2b). Cas9 of F. novicida was selected for type II-B. The closely related Cas9 orthologs of P. multocida and N. meningitidis and the distinct, short Cas9 of C. jejuni were chosen for type II-C (FIG. 1B). Expression of associated tracrRNAs and crRNAs in S. pyogenes, S. mutans, F. novicida, N. meningitidis and C. jejuni was already validated by deep RNA sequencing (15,16). The RNAs in S. thermophilus and P. multocida were predicted bioinformatically based on the sequences from related species within the same type II group. FIG. 1B shows the organization of the eight selected type II CRISPR-Cas loci and highlights our previous findings demonstrating that the type II loci architectures are highly variable among subtypes, yet conserved within each group (15). These variations are in good agreement with the clustering derived from the Cas9 and Cas1 phylogenetic trees (FIG. 1A, Supplementary FIG. S4).

[0494] Thus, to evaluate dual-RNA:Cas9 diversity, the bioinformatics analysis of type II CRISPR-Cas systems from available genomes identified Cas9 orthologs in a plethora of bacterial species that belong to 12 phyla and were isolated from diverse environments (Supplementary Tables S2 and S4). Most of the strains that harbor type II CRISPR-Cas systems (and accordingly Cas9) are pathogens and commensals of vertebrates. A majority of these strains were isolated from gastrointestinal tracts and feces of mammals, fish and birds, but also from wounds, abscesses and spinocereberal fluid of septicaemia patients. Strains were also isolated from invertebrates and environmental samples, including fresh and sea water, plant material, soil and food, the latter comprising species used in fermentation processes. Cas9 is also present in species from extreme environments such as deep sea sediments, hot springs and Antarctic ice, further demonstrating the wide spread of type II CRISPR-Cas systems in bacteria. A comparison of the taxonomy and habitats of representative strains with the phylogenetic clustering of Cas9 sequences shows little correlation (Supplementary FIG. S11). In particular, clusters of Cas9 genes were identified from taxonomically distant bacteria that were isolated from similar habitats. Examples include diverse Firmicutes, Molicutes, Spirochaete and Fusobacteria, that were all isolated from gastrointestinal tracts of mammals, and members of different Proteobacteria, Firmicutes and Fusobacteria families mostly found in environmental samples (Supplementary FIG. S11, clusters 1 and 3). A few exceptions involve grouping of Cas9 genes from closely related species isolated from diverse habitats such as Actinobacteria isolated from human and dog specimens but also from hot springs (Supplementary FIG. S11, clusters 2, 4 and 5). This complex distribution of Cas9 across bacterial genomes indicates that evolution of dual-RNA:Cas9 systems in bacteria occurs both vertically and horizontally (55).

### Example 2

### Bacterial RNases III are Interchangeable in Dual-RNA Maturation

[0495] As described in S. pyogenes and S. thermophilus, RNase III plays an essential role in the biogenesis of dual-RNA:Cas9 systems by co-processing tracrRNA and pre-crRNA at the level of antirepeat:repeat duplexes (16,17). The interchangeability of S. pyogenes RNase III with RNases III from selected bacterial species was analyzed in the co-processing of S. pyogenes tracrRNA:pre-crRNA, including strains that lack type II CRISPR-Cas (S. aureus COL, E. coli TOP10). Northern blot analysis showed that all RNases III studied can co-process the RNA duplex (FIG. 2, Supplementary FIG. S5), indicating that there is no species-specificity for tracrRNA:pre-crRNA cleavage by RNase III. Multiple sequence alignment of RNase III orthologs demonstrates conservation of the catalytic aspartate residue and the dsRNA binding domain (FIG. 2, Supplementary FIG. S6) that are both required for RNA co-processing (FIG. 2, Supplementary FIG. S5). These data imply that the conservation of tracrRNA:pre-crRNA co-processing by bacterial RNase III provides a degree of flexibility allowing the functionality of dual-RNA:Cas9 systems in multiple species upon horizontal transfer.

[0496] Thus, to investigate the basis for the horizontal dissemination of CRISPR-Cas modules among bacteria, the specificity of RNase III utilized by type II CRISPR-Cas for dual-RNA maturation was analyzed. Complementation analysis shows that RNase III from a variety of species, including bacteria that lack type II CRISPR-Cas, can process S. pyogenes tracrRNA:pre-crRNA, suggesting that type II CRISPR-Cas systems can exploit any double-stranded RNA cleavage activity. This finding is consistent with the observation of S. pyogenes dual-RNA maturation in human cells which is apparently mediated by host RNases (2).

### Example 3

### Cas9 HNH and Split RuvC Domains are the Catalytic Moieties for DNA Interference

[0497] Comparison of Cas9 sequences revealed high diversity in amino acid composition and length (984 amino acid for C. jejuni to 1648 amino acids for F. novicida), especially in the linker sequence between the highly conserved N-terminal RuvC and central RuvC-HNH-RuvC regions and in the C-terminal extension (Supplementary FIG. S2). Several studies demonstrated the importance of the nuclease motifs for dsDNA cleavage activity by mutating one aspartate in the N-terminal motif of the RuvC domain and one or several residues in the predicted catalytic motif of the HNH domain of the Cas9 enzyme (14,22,23). To investigate the relevance of all catalytic motifs for tracrRNA:pre-crRNA processing and/or DNA interference, alanine substitutions of selected residues were created (FIG. 3A). In addition to the already published catalytic amino acids, we created Cas9 point mutants of conserved amino acid residues in the central RuvC motifs (14) (FIG. 3A, Supplementary FIG. S2). Northern blot analysis of S. pyogenes cas9 deletion mutant complemented with each of the cas9 point mutants revealed the presence of mature tracrRNA and crRNA forms, demonstrating that none of the catalytic motifs is involved in dual-RNA maturation by RNase III. This is in agreement with previous data showing that RNase III is the enzyme that specifically cleaves tracrRNA:pre-crRNA duplex (16). Cas9 seems to have a stabilizing function on dual-RNA. We show that the catalytic motifs are not involved in RNA duplex stabilization (FIG. 3B, Supplementary FIG. S7).

[0498] To investigate the involvement of the conserved motifs of Cas9 in DNA interference in vivo, a previously described plasmid-based read-out system was used that mimics infection with invading protospacer-containing DNA elements (16). Transformation assays were done in S. pyogenes WT or a cas9 deletion mutant using plasmids containing the speM protospacer gene (complementary to the second spacer of S. pyogenes SF370 type II CRISPR array (16)) and WT or mutant cas9 (FIG. 3C). In this assay, Cas9 expressed following plasmid delivery in bacterial cells catalyzes its own vector cleavage, when active. Control experiments showed that the speM protospacer-containing plasmid was not tolerated in WT S. pyogenes, demonstrating activity of WT CRISPR-Cas. Similarly, a plasmid containing the speM protospacer and encoding WT Cas9 could not be maintained in the cas9 deletion mutant, demonstrating that Cas9 is able to cleave the plasmid from which it is expressed. Except for Cas9 N854A, all plasmids encoding Cas9 mutants were tolerated in the cas9 deletion strain, indicating abrogation of Cas9 interference activity for these variants.

[0499] The in vivo DNA targeting data were confirmed with in vitro DNA cleavage assays. Purified WT and mutant Cas9 proteins were incubated with tracrRNA:crRNA targeting speM and subjected to cleavage of plasmid DNA containing the speM protospacer. WT and N854A Cas9 show dsDNA cleavage activity, whereas the other Cas9 mutants cleave only one strand of the dsDNA substrate, yielding nicked open circular plasmid DNA (FIG. 3D). This corroborates the results obtained in vivo showing the importance of the conserved nuclease motifs for DNA interference by Cas9. In addition to the previously published data demonstrating the importance of the N-terminal RuvC motif and the catalytic motif of HNH, we thus defined new catalytic residues in the central RuvC motifs.

[0500] Dual-RNA and Cas9 sequences have widely evolved in bacteria (15). However, despite the high sequence variability among Cas9 sequences, certain motifs are conserved. In addition to the previously identified central HNH and N-terminal RuvC catalytic motifs (20,21,44,56), we show that the two middle RuvC motifs are required for interference activity in vivo and in vitro. In agreement with previous findings, deactivation of either one of the catalytic motifs (RuvC or HNH) results in nicking activity of Cas9 originating from the other motif (2,8,24,25). None of the mutations introduced in these conserved motifs affected the role of Cas9 in tracrRNA:pre-crRNA maturation by RNase III in vivo.

### Example 4

### Only Cas9 from Closely Related CRISPR-Cas Systems can Substitute for S. pyogenes Cas9 in tracrRNA-Directed Pre-crRNA Maturation by RNase III

[0501] Beside the conservation of the HNH and split RuvC domains involved in DNA cleavage (14,15), the length of Cas9 orthologs and the amino acid sequences of Cas9 are highly variable among the different groups of type II CRISPR-Cas systems (FIG. 4A, Supplementary FIG. S2). Hence, whether this variability plays a role in the specificity of Cas9 with regard to tracrRNA:pre-crRNA duplex and mature crRNA stabilization was investigated. A S. pyogenes cas9 deletion mutant was complemented with Cas9 from selected bacterial species representative of the various type II groups and analyzed tracrRNA:pre-crRNA processing by Northern blot. Cas9 proteins from S. mutans and S. thermophilus* can substitute for the stabilizing role of S. pyogenes Cas9 in RNA processing by RNase III (FIG. 4B, Supplementary FIG. S8). By contrast, Cas9 from S. thermophilus**, C. jejuni, N. meningitidis, P. multocida and F. novicida could not complement the lack of RNA processing in the cas9 mutant of S. pyogenes. In these strains, the 75-nt processed form of tracrRNA is observed as a very weak signal of background level of dual-RNA processed by RNase III in the absence of Cas9. Overall, only Cas9 from closely related systems of S. pyogenes in the type II-A cluster can substitute endogenous Cas9 role in dual-RNA stabilization and subsequent maturation by RNase III.

[0502] Thus, substitution of orthologs from the selected species for the endogenous S. pyogenes Cas9 shows that only Cas9 proteins from the S. pyogenes subcluster are capable of assisting tracrRNA:pre-crRNA processing by RNase III. This result indicates that the less-conserved inter-motif regions, which are the basis for the Cas9 subgrouping, could be responsible for Cas9 specificity for certain dual-RNAs.

### Example 5

### Cas9 Orthologs Require their Specific PAM Sequence for DNA Cleavage Activity

[0503] In S. pyogenes and S. thermophilus* types II-A, PAMs were identified as NGG and NGGNG, respectively. In these two species, mutating the PAM abrogates DNA interference by dual-RNA:Cas9 (14,22,23). To identify the functional PAMs for Cas9 from bacterial species other than S. pyogenes and S. thermophilus, potential protospacers matching spacer sequences in the selected CRISPR arrays were searched using BLAST. For S. mutans UA159, C. jejuni NCTC 11168, P. multocida Pm70 and F. novicida U112, potential protospacers were identified. Therefore, strains that harbor a closely related variant of Cas9 (Supplementary Table S2) were searched and their spacer sequences analyzed following the same approach (Supplementary Table S3). The identified 10 nt sequences located directly downstream of the protospacer sequence were aligned and the most common nucleotides that could represent PAM sequences were delineated. Based on the data visualized as a logo plot (FIG. 5A), plasmid DNA substrates were designed containing the speM protospacer followed by different adjacent sequences either comprising the predicted PAM or not (FIG. 5B). The Cas9 orthologous proteins were purified (Supplementary FIG. S1) and dual-RNA orthologs were designed based on deep RNA sequencing data (15), with the spacer sequence of crRNA targeting speM. To determine the protospacer-adjacent sequences critical for efficient DNA targeting, the purified Cas9 orthologs and their cognate dual-RNAs were used in DNA cleavage assays with different plasmid substrates (FIG. 5C, Supplementary FIG. S9). The previously published PAMs for Cas9 from S. pyogenes (NGG), S. mutans (NGG), S. thermophilus* (NGGNG) and N. meningitidis (NNNNGATT) (27,28,53,54) were confirmed by multiple sequence alignments and in vitro cleavage assay, validating our approach. However, dual-RNA guided Cas9 from S. thermophilus* could efficiently cleave target DNA in the presence of only NGG instead of NGGNG (Supplementary FIG. S9). This is in contrast to data obtained in vivo, where mutation of the third G abrogates interference by Cas9 of S. thermophilus* (23). For S. thermophilus**, the PAM was published as NNAGAAW (27), which differs by one base from the sequence that we derived (NNAAAAW). In vitro cleavage assays with these two sequences demonstrate that the DNA substrate with the “NNAAAAW” PAM is cleaved more efficiently by Cas9 of S. thermophilus** compared to the “NNAGAAW” PAM (Supplementary FIG. S9).

[0504] Using the same approach, the PAM activity of the most common protospacer-downstream sequences for C. jejuni, F. novicida and P. multocida were validated by in vitro cleavage assays, resulting in the most probable PAM sequences being NNNNACA (C. jejuni), GNNNCNNA (P. multocida) and NG (F. novicida) (FIG. 5C, Supplementary FIG. S9). Analysis of the protospacer-adjacent sequence from C. jejuni shows the same frequency of C and A (“NNNNCCA” or “NNNNACA”) at position 5 downstream of the protospacer (Supplementary Table S3). Hence, both substrates were tested for cleavage activity by C. jejuni dual-RNA:Cas9. Only the DNA target containing A at this position was cleaved efficiently (Supplementary FIG. S9). This result could be explained by the origin of the protospacer, with the “NNNNCCA” PAM being mostly found in genomic DNA or prophages of Campylobacter strains. In this case, the mutated PAM sequence on the chromosomally located protospacer prevents self-targeting. The P. multocida PAM requires further verification given that the multiple sequence alignment was derived from only two protospacer sequences. Thus, a series of specific PAMs that enable dsDNA cleavage by dual-RNA:Cas9 complexes from different bacterial species in vitro were identified. For gene editing purposes, it is contemplated that a range of potential motifs be analyzed to select those PAMs that would allow efficient targeting with limited off-site effect.

Supplementary Table S3. Overview of type II CRISPR-Cas spacer sequences from selected bacterial
strains with BLAST candidate protospacers and their downstream sequence.

| | Number of | CRISPR | |
|---|---|---|---|
| Strain^{a} | spacers | Spacer^{b} | Spacer sequence |
| Sreptococcus pyogenes | 6 | 1 | TGCGCTGGTTGATTTCTTCTTGC |
| SF370 | | | GCTTTTT |
| (Accession: NC_002737) | | 2 | TTATATGAACATAACTCAATTTG |
| | | | TAAAAAA |
| | | 3 | AGGAATATCCGCAATAATTAATT |
| | | | GCGCTCT |
| | | 4 | AGTGCCGAGGAAAAATTAGGTGC |
| | | | GCTTGGC |
| | | 5 | TAAATTTGTTTAGCAGGTAAACC |
| | | | GTGCTTT |
| Streptococcus mutans | 5 | 3 | CTAACTATGATGACACAACAGCT |
| UA159 (Accession: NC_004350) | | | TTTAGCG |
| Streptococcus mutans LJ23 | 8 | 2 | TGAAGTGCAAGCTTACGTGACTG |
| (Accession: NC_017768) | | | ACTCGCG |
| Streptococcus mutans GS-5 | 21 | 3 | TAATAGCAATCGTGACGGACGTA |
| (Accession: NC_018089) | | | TTGATTT |
| | | 5 | GTTGAGTGCAACAGCTAGCTAAT |
| | | | AGCTTTT |
| | | 16 | AGGCATTTTCTGATTGAGATTTT |
| | | | CGATATT |
| | | 18 | TATAGCTAATATGTGTATACTGA |
| | | | CAGCGCA |
| Streptococcus mutans | 69 | 2 | GATTGTGCCCGCTAGTAAACCGC |
| NN2025 | | | CTCGCGC |
| (Accession: NC_013928) | | 6 | GATTGTATCAGTAATCGAACTTC |
| | | | TGCTTAT |
| | | 8 | TGGTCCAAAGTGCAGAGCCAAAG |
| | | | AAAAACA |
| | | 9 | ATTGTCAATCGCCGTTCTGCGCT |
| | | | TGCGACG |
| | | 17 | GCTTGAATATAATTGTGTATCCG |
| | | | CCAATGA |
| | | 23 | AAAAAGAAACGCCTTTTGATTTG |
| | | | ACCAATC |
| | | 29 | AGTTATTAATATCTATGACAGTC |
| | | | TCAAAGA |
| | | 37 | TTCTGGCTGTCTTTCAGAGTGAT |
| | | | AAGCGCA |
| | | 40 | TGCAAGTTATCTTGCTATGTGGA |
| | | | CGAATTG |
| | | 43 | GCAATTTAGTTTTATTCCGTGGG |
| | | | AGCAGCA |
| | | 48 | AGAGTATAGCCAGTGTTTTCAAG |
| | | | GCCTTTA |
| | | 49 | CGCAACAATGACTATTAATATCA |
| | | | ACGGTGG |
| | | 56 | AATCGCTTCTTTGCTAACCACAA |
| | | | TTTGTGC |
| | | 60 | AAATGCTCTTGAAGAACCTGATA |
| | | | GATGACA |
| | | 66 | TGCAAAAGATGGCCTCGAGCAAT |
| | | | TATCGCA |
| Streptococcus thermophilus | 8 | 2 | TCAATGAGTGGTATCCAAGACGA |
| LMD-9 | | | AAACTTA |
| CASS4 locus | | 3 | CCTTGTCGTGGCTCTCCATACGC |
| (Asccession: NC_008532) | | | CCATATA |
| | | 4 | TGTTTGGGAAACCGCAGTAGCCA |
| | | | TGATTAA |
| | | 5 | ACAGAGTACAATATTGTCCTCAT |
| | | | TGGAGACAC |
| | | 6 | CTCATATTCGTTAGTTGCTTTTG |
| | | | TCATAAA |
| Streptococcus thermophilus | 16 | 2 | CTTCACCTCAAATCTTAGAGCTG |
| LMD-9 | | | GACTAAA |
| CASS4a locus | | 3 | ATGTCTGAAAAATAACCGACCAT |
| (Accession: NC_008532) | | | CATTACT |
| | | 4 | GAAGCTCATCATGTTAAGGCTAA |
| | | | AACCTAT |
| | | 5 | TAGTCTAAATAGATTTCTTGCAC |
| | | | CATTGTA |
| | | 6 | ATTCGTGAAAAAATATCGTGAAA |
| | | | TAGGCAA |
| | | 7 | TCTAGGCTCATCTAAAGATAAAT |
| | | | CAGTAGC |
| | | 13 | AACTACCAAGCAAATCAGCAATC |
| | | | AATAAGT |
| | | 16 | AACAGTTACTATTAATCACGATT |
| | | | CCAACGG |
| Campylobacter jejuni subsp. jejuni | 5 | 1-5 | |
| NCTC 11168 | | | |
| (Accession: NC_002163) | | | |
| Campylobacter jejuni | 5 | 3 | TCATCATCACTTAAAACCTTAAA |
| subsp. jejuni CF93-6 | | | TTTACC |
| (Accession: AANJ00000000) | | | |
| Campylobacter jejuni subsp. jejuni | 9 | 1 | GCATTGCTTTACTACATAGCCAG |
| HB93-13c_jejuni_subsp_jejunihb_13_42 | | | TCGTGTA |
| (Accession: AANQ00000000) | | | |
| Campylobacter jejuni subsp. | 5 | 2 | TTATTTTTGTCGCTAATTGCACC |
| jejuni NW | | | TAAAGAC |
| genomic scaffold | | 5 | GGGACACGAGGAATCCTGTCTGA |
| Mich_State_Univ:Contig3 | | | ATCCGGG |
| (Accession: JH376989 | | | |
| REGION: 13521 . . . 15062) | | | |
| Campylobacter jejuni subsp. | 5 | 2 | CTAAGCAATCTTATTTTACCATC |
| doylei 269.97 | | | TTTTTTA |
| (Accession: NC_009707) | | | |
| Campylobacter jejuni subsp. jejuni 1336 | 2 | 1 | TTACTGATATTAAAATTAACTCC |
| (Accession: NZ_CM000854 | | | ATAATTT |
| NZ_ADGL01000000) | | | |
| | | 2 | ATAAAGCTAATGCAAAAGTTGAA |
| | | | AACAAA |
| Campylobacter jejuni subsp. | 33 | 2 | TTTATCTGCATCCATAATGGCAA |
| jejuni 414 | | | TGAGTGA |
| (Accession: NZ_CM000855 | | | |
| NZ_ADGM01000000) | | | |
| Neisseria meningitidis | 16 | 2 | CTTCTGCCTTTTTACAAGCTCGC |
| serogroup A | | | TTTCTTT |
| strain Z2491 | | 3 | TTTGGTAAAGGTTTCTGTTGCGA |
| (Accession: NC_003116) | | | CCCGAAT |
| | | 7 | AAATTCGTTTCAGATAGCAAACG |
| | | | CAGTAGT |
| | | 12 | GGGTAGCCAGTGCTAAAACCGCA |
| | | | CCCGCTT |
| | | 13 | CCAAATAGAAATACATACGCCGA |
| | | | GTAATTA |
| | | 14 | TTTCTTTTTGTAATTGTTCTGCC |
| | | | TTTTTTA |
| | | 15 | TACCCACGGCGGAAACCATTGCC |
| | | | ACAAAAC |
| Pasteurella multocida | 5 | 1-5 | |
| str. Pm70 | | | |
| (Accession: NC_002663) | | | |
| Pasteurella multocida | 20 | 9 | AAAGAATACACCCTTATTCCAAA |
| subsp. gallicida X73 | | | AAGTTTG |
| (Accession: CM001580 | | 15 | GTCTGAACAGTATTAACACTTCC |
| AMBP01000000) | | | TGTTTCT |
| Francisella tularensis subsp. | 13 | 1-13 | |
| novicida U112 | | | |
| (Accession: NC 008601) | | | |
| Francisella novicida FTG | 22 | 15 | ATCTCAAAAGCAGCTCTTTCGCG |
| | | | TGTAATATCGTT |
| FTG scaffold | | 19 | CTATCTAAGAGAACTTACAAGAC |
| 1 genomic scaffold | | | AAGAGAAAATACT |
| (Accession: NZ DS995363 | | | |
| NZ ABXZ01000000) | | | |
| Francisella tularensis subsp. novicida | 10 | 2 | AGCCCTATCAGAAATATATGCAA |
| GA99-3548 | | | GTTTGAATATAG |
| supercont1.3 | | 3 | AGATAACTCTTATATTGATTTGT |
| (Accession: DS264589 | | | ATATTGAAGATA |
| ABAH01000000) | | 4 | CGCAAAAAAGGCGAATTTGAGCA |
| | | | GAAAATTTGGGC |

| | | | 10 bp |
|---|---|---|---|
| | | % | downstream |
| Strain^{a} | Blast candidate^{c} | identity^{d} | protospacer^{e} |
| Sreptococcus pyogenes SF370 | S. pyogenes MGAS1882 (MGAS1882_1116), MGAS8232 (spyM18_0769), MGAS10394 (M6_Spy0995, | 100 | [chemical structure] |
| (Accession: NC_002737) | M6_Spy1349), SSI-1 (SPs0926), φP9 | | |
| | endopeptidase gene | | |
| | S. pyogenes MGAS2096 (MGAS2096_Spy1450), A20 (A20_1472c), M1 476 (M1GAS476_1503), MGAS9429 | 97 | [chemical structure] |
| | (MGAS9429_Spy1426), MGAS5005 (M5005_Spy1424) | | |
| | endopeptidase gene | | |
| | S. pyogenes M1 GAS (SPy_0700), MGAS2096 (MGAS2096_Spy0592) | 97 | [chemical structure] |
| | endopeptidase gene | | |
| | S. pyogenes MGAS6180 (M28_Spy1234); NIH1 (NIH1.1_43), SSI-1 (SPs0647), MGAS315 (SpyM3_0930, | 100 | [chemical structure] |
| | SpyM3_1215) | | |
| | phage related gene | | |
| | gene for pyrogenic exotoxin M (speM) of several Streptococci strains | 100 | [chemical structure] |
| | S. pyogenes MGAS8232 (spyM18_0742), MGAS10750 (MGAS10750_Spy0588), MGAS10270 | 100 | [chemical structure] |
| | (MGAS10270_Spy0563) | | |
| | adenine specific methylase gene | | |
| | S. pyogenes Manfredo (SpyM50653) adenine specific methylase gene | 97 | [chemical structure] |
| | S. pyogenes Alab49 (SPYALAB49_001176), MGAS10750 (MGAS10750_Spy1285), MGAS9429 | 100 | [chemical structure] |
| | (MGAS9429_Spy0843), MGAS10394 (M6_Spy1203), | | |
| | SSI-1 (SPs0763), MGAS315 (SpyM3_1101), | | |
| | φH4489A (hylP) hyaluronoglucosaminidase gene | | |
| | S. pyogenes MGAS8232 (spyM18_1254), NZ131 (Spy49_0785) hyaluronoglucosaminidase gene | 97 | [chemical structure] |
| | S. pyogenes MGAS10750 (MGAS10750_Spy0839), MGAS10270 (MGAS10270_Spy0546, MGAS10270_Spy0804), SSI-1 (SPs0517, SPs0888), | 100 | [chemical structure] |
| | MGAS1882 (MGAS1882_1156), MGAS8232, | | |
| | NZ131(Spy49_1511c), MGAS315 (SpyM3_0965, | | |
| | SpyM3_1347) | | |
| | phage protein gene or intergenic region | | |
| Streptococcus mutans UA159 (Accession: NC_004350) | φM102 (orf13) putative tail protein gene | 100 | [chemical structure] |
| Streptococcus mutans LJ23 (Accession: NC_017768) | φM102 (orf15) putative minor structural protein | 90 | [chemical structure] |
| Streptococcus mutans GS-5 (Accession: NC_018089) | φM102 (orf15) putative minor structural protein | 97 | [chemical structure] |
| | φM102 | 100 | [chemical structure] |
| | φM102 (orf3) putative large terminase gene | 93 | [chemical structure] |
| | φM102 (orf7) putative DNA packaging protein gene | 100 | [chemical structure] |
| Streptococcus mutans NN2025 | φM102 (orf20) putative endolysin gene | 93 | [chemical structure] |
| (Accession: NC_013928) | φM102 (orf38, orf39) hypothetical protein gene | 93 | [chemical structure] |
| | φM102 (orf11) putative major tail protein gene | 97 | [chemical structure] |
| | φm102 (orf17) hypothetical protein gene | 90 | [chemical structure] |
| | φM102 (orf21) putative replisome organizer gene | 93 | [chemical structure] |
| | φM102 (orf14) putative receptor-binding protein gene | 90 | [chemical structure] |
| | φM102 (orf14) putative receptor-binding protein gene | 93 | [chemical structure] |
| | φM102 (orf2) putative small terminase gene | 100 | [chemical structure] |
| | φM102 (orf9) hypothetical protein gene | 93 | [chemical structure] |
| | φM102 (orf3) putative large terminase gene | 93 | [chemical structure] |
| | φM102 (orf12) putative tape measure protein gene | 93 | [chemical structure] |
| | φM102 (orf15) putative minor structural protein gene | 93 | [chemical structure] |
| | φM102 (orf26) putative RecT family single-strand annealing protein gene | 93 | [chemical structure] |
| | φM102 (orf3) putative large terminase gene | 93 | [chemical structure] |
| | φM102 (orf33) hypothetical protein gene | 100 | [chemical structure] |
| Streptococcus thermophilus | Streptococcus thermophilus plasmid pSt106 putative resolvase gene | 100 | [chemical structure] |
| LMD-9 CASS4 locus | Streptococcus thermophilus plasmid pND103 | 100 | [chemical structure] |
| (Asccession: NC_008532) | φ7201 (orf33) | 100 | [chemical structure] |
| | φ TP-J34 (orf11) hypothetical protein gene | 94 | [chemical structure] |
| | φSfi19 (orf1626) minor tail protein gene | 100 | [chemical structure] |
| | φYMC 2011 (Ssal_phage00063) putative minor tail protein gene | 90 | [chemical structure] |
| | φ7201 (orf33) | 90 | [chemical structure] |
| Streptococcus thermophilus | φ7201 (orf39) | 100 | [chemical structure] |
| LMD-9 CASS4a | φ TP-J34 (orf49), φSfi11 (orf669) putative minor structural protein gene | 93 | [chemical structure] |
| locus (Accession: | φALQ13.2 (orf35) helicase gene | 90 | [chemical structure] |
| NC_008532) | φSfi11 (orf443), φSFi18 (orf443), φSfi21 (orf443), φSfi19 (orf443), φO1205 (orf10) putative helicase gene | 90 | [chemical structure] |
| | φ1033, φ 1042 nonfunctional host specificity protein gene | 97 | [chemical structure] |
| | φDT1.1 (orf18), φDT1.2 (orf18), φDT1.3 (orf18), φDT1.4 (orf18), φDT1.5 (orf18), φMD4 (orf18) host specificity protein gene | 93 | [chemical structure] |
| | pSt08 plasmid | 97 | [chemical structure] |
| | φALQ13.2 (orf25), φ858 (orf30), φST3 (orf253) endonuclease gene | 90 | [chemical structure] |
| | φJ1 (orf253), φS3b (orf253) endonuclease gene | 90 | [chemical structure] |
| | φSfi11 | 100 | [chemical structure] |
| | φYMC-2011 (Ssal_phage00051) predicted cip-protease gene | 93 | [chemical structure] |
| | φSfi21 (orf221) cip-protease gene | 90 | [chemical structure] |
| | φ858 (orf22) | 93 | [chemical structure] |
| | φ2972 (orf21) structural protein gene | 93 | [chemical structure] |
| | φAbc2 (orf17) tail protein gene | 93 | [chemical structure] |
| Campylobacter jejuni | no significant BLAST hits | | |
| subsp. jejuni | | | |
| NCTC 11168 | | | |
| (Accession: NC_002163) | | | |
| Campylobacter jejuni subsp. jejuni CF93-6 (Accession: AANJ00000000) | C. jejuni RM1221 (CJE1445) hypothetical protein gene | 93 | [chemical structure] |
| Campylobacter jejuni subsp. jejuni HB93-13c_jejuni_subsp_jejunihb_13_42 (Accession: AANQ00000000) | C. jejuni subsp. doylei 269.97 (JJD26997_1148) conserved hypothetical protein gene | 100 | [chemical structure] |
| Campylobacter jejuni subsp. jejuni NW | C. jejuni subsp. doylei 269.97 (JJD26997_0867) putative primase gene | 97 | [chemical structure] |
| genomic scaffold Mich_State_Univ:Contig3 (Accession: JH376989 | C. jejuni subsp. jejuni PT14 (A911_r08426, A911_r08428, A911_r08430), NCTC 11168-BN148 (BN148_r02, BN148_r05, BN148_r08), S3 (CJS3_1811, CJS3_1817, | 100 | [chemical structure] |
| REGION: 13521 . . . 15062) | CJS3_1830), ICDCCJ07001 (ICDCCJ07001_29, | | |
| | ICDCCJ07001_396, ICDCCJ07001_718), M1 | | |
| | (CJM1_0031, CJM1_0413, CJM1_0727), IA3902 | | |
| | (CJSA_Cj23SA, CJSA_Cj23SB, CJSA_Cj23SAC), | | |
| | BABS091400, 81116 (C8J_Cj23SA, C8J_Cj23SB, | | |
| | C8J_Cj23SC), 81-176 (CJJ81176_1714, CJJ81176_1727, | | |
| | CJJ81176_1707), NCTC 11168; C. jejuni DSM 4688, | | |
| | UNSW091300, strain 100, RP0001, 102-27 (rrIC, rrIB, | | |
| | rrIA), 69-30 (rrIC, rrIB, rrIA), 140-16 (rrIC, rrIB, rrIA), | | |
| | 110-21 (rrIC, rrIB, rrIA), RM1221 | | |
| | (CJE_Cj23SA, CJE_Cj23SB, | | |
| | CJE_Cj23SC), TGH9011_ATCC43431 (rrI); C. coli 59-2 | | |
| | (rrIC, rrIB, rrIA); C. jejuni subsp. doylei 269.97 | | |
| | (JJD26997_0040, JJD26997_1264, JJD26997_1520) | | |
| | 23S rRNA gene | | |
| Campylobacter jejuni subsp. | C. jejuni strain TGH 9011 (Tgh093) | 97 | [chemical structure] |
| doylei 269.97 (Accession: NC_009707) | C. jejuni RM1221 (CJE1099) hypothetical protein gene | 93 | [chemical structure] |
| Campylobacter jejuni subsp. jejuni 1336 (Accession: | C. jejuni 00-3477 (cje0227), C. jejuni subsp. jejuni S3 (CJS3_0723), φCGC-2007 prophage related genes | 100 | [chemical structure] |
| NZ_CM000854 NZ_ADGL01000000) | C. jejuni NCTC 13255 (putative CJIE1-2-like prohage), 99-7046 (putative CJIE1-3-like prophage), 00-2425 (putative CJIE1 prophage), RM1221 (CJE0227) C. jejuni | 93 | [chemical structure] |
| | subsp. jejuni ICDCCJ07001 (ICDCCJ07001_691) | | |
| | major tail sheath protein | | |
| | C. jejuni NCTC 13255 (putative CJIE1-2-like prophage), 99-7046 (patative CJIE1-3-like prophage), 00-3477 (putative CJIE1-4 Mu-like prophage), 00-2425 (putative | 100 | [chemical structure] |
| | CJIE1 prophage), RM1221 (CJE0238), C. jejuni subsp. | | |
| | jejuni S3 (CJS3_0704), ICDCCJ07001, C. hyoilei | | |
| | hypothetical protein gene | | |
| Campylobacter jejuni subsp. jejuni 414 (Accession: NZ_CM000855 | C. jejuni subsp. jejuni PT14 (A911_03310), NCTC 11168- BN148 (BN148_0680c), S3 (CJS3_0675), ICDCCJ07001 (ICDCCJ07001_619), M1 (CJM1_0650), IA3902 | 97 | [chemical structure] |
| NZ_ADGM01000000) | (CJSA_0644), 81116 (C8J_0632), 81-176 | | |
| | (CJJ81176_0703), NCTC 11168 (Cj0680c), P694a | | |
| | (Cj0680c), P569a (Cj0680c), P179a (Cj0680c), H73020 | | |
| | (Cj0680c), H704a (Cj0680c), | | |
| | C. jejuni RM1221 (CJE0778), | | |
| | C. jejuni subsp. doylei 269.97 (JJD26997_1327) | | |
| | excinuclease ABC subunit B gene | | |
| Neisseria meningitidis serogroup A strain Z2491 | N. gonorrhoeae (NGU65994, PivNG), FA 1090 (NGO1137, NGO1164, NGO1262) invertase related genes, phage associated protein genes | 97 | [chemical structure] |
| (Accession: NC_003116) | N. meningitidis NZ-05/33 (NMBNZ0533_1722), M04- 240196 (NMBNZ0533_1722), M01-240149 (NMBH4476_1701), H44/76 (NMBH4476_1701) | 100 | [chemical structure] |
| | hypothetical proteins upstream of transposase gene | | |
| | N. lactamica isolate 3207487 (plasmid pNL3.2), N. lactamica (plasmid pNL9) | 97 | [chemical structure] |
| | N. gonorrhoeae TCDC-NG08107, NCCP11945 intergenic region (putative phage proteins) | 93 | [chemical structure] |
| | N. gonorrhoeae NCCP11945 (NGK_1948, NGK_1990, NGK_2023) hypothetical protein genes | 93 | [chemical structure] |
| | N. gonorrhoeae intergenic region PivNG | 93 | [chemical structure] |
| | N. gonorrhoeae FA 1090 numerous intergenic regions in prophages | 93 | [chemical structure] |
| | N. gonorrhoeae TCDC-NG08107, N. gonorrhoeae NCCP11945 intergenic region (putative phage proteins) | 97 | [chemical structure] |
| | N. lactamica plasmid pNL9 | 93 | [chemical structure] |
| | N. meningitidis plasmid pJS-B | 100 | [chemical structure] |
| | N. lactamica plasmid pNL9 | 93 | [chemical structure] |
| | N. meningitidis plasmid pJS-B | 97 | [chemical structure] |
| | N. lactamica plasmid pNL9 | 100 | [chemical structure] |
| | N. meningitidis plasmid pJS-B | 100 | [chemical structure] |
| | N. meningitidis strain alpha522 draft genome (NMALPHA522_0671), H44/76 (NMBH4476_0684), 053442 (NMCC_0153), N. meningitidis serogroup C | 100 | [chemical structure] |
| | FAM18 (NMC1864) | | |
| | hypothetical protein gene | | |
| | N. meningitidis M04-240196 (NMBM04240196_0048, NMBM04240196_0749) putative membrane protein gene | 100 | [chemical structure] |
| Pasteurella multocida | no significant BLAST hits | | |
| str. Pm70 | | | |
| (Accession: | | | |
| NC_002663) | | | |
| Pasteurella multocida subsp. gallicida X73 | P. multocida 1.8 kb plasmid | 100 | [chemical structure] |
| (Accession: CM001580 AMBP01000000) | P. multocida subsp. multocida str. HN06(PMCN06_2098) hypothetical protein gene | 97 | [chemical structure] |
| Francisella tularensis | no significan BLAST hits | | |
| subsp. novicida U112 | | | |
| (Accession: NC 008601) | | | |
| Francisella novicida FTG | F. cf. novicida 3523 (FN3523_1002) phage protein gene | 91 | [chemical structure] |
| FTG scaffold 1 genomic scaffold (Accession: | F. cf. novicida 3523 (FN3523_0993) hypothetical protein gene | 94 | [chemical structure] |
| NZ DS995363 | | | |
| NZ ABXZ01000000) | | | |
| Francisella tularensis subsp. novicida | F. cf. novicida 3523 (FN3523_1009) phage-related baseplate assembly protein gene | 89 | [chemical structure] |
| GA99-3548 supercont1.3 | F. cf. novicida 3523 (FN3523_1006) hypothetical protein gene | 94 | [chemical structure] |
| (Accession: DS264589 ABAH01000000) | F. cf. novicida 3523 (FN3523_0999) hypothetical protein gene | 91 | [chemical structure] |

^{a}Selected strains used in this study. No potential protospacers were found for Streptococcus mutans UA159, Campylobacter jejuni subsp. jejuni NCTC 11168, Pasteurella multocida str. Pm70 and Francisella tularensis subsp. novicida U112. Therefore, closely related strains were analyzed for the presence of type II CRISPR-Cas arrays.
Spacer sequences from selected arrays were then used to search for protospacer candidates.
^{b}Numbering of spacers starts from the leader proximal end based on RNAseq data (15). Spacers with no significant protospacer BLAST hit are not listed in the table.
^{c}A BLAST candidate was considered a potential protospacer when the identity to the spacer was ≧90% and when the protospacer originated either from phage, plasmid or genomic DNA related to the analyzed species. For each identified protospacer, the strain name, the protospacer-containing gene locus and the potential function of the gene are given.
^{d}Percentage identity between spacer and protospacer sequence. e10 nt sequence located directly 3′ of the protospacer sequence. The identified sequences for each bacterial species were aligned using GeneDoc (http://www.nrbsc.org/gfx/genedoc/). The degree of conservation is indicated with a color code (black: 100%, dark grey: ≧80%, light grey: ≧60%). These sequences were used to create the logo plot represented in FIG. 5.

SUPPLEMENTARY TABLE S4
Cas9 is present in bacteria from 12 different phyla and diverse habitats

| | | |
|---|---|---|
| Strain^{a} | Class | Isolation/habitat^{b} |

Actinobacteria
Actinobacteridae

| | | |
|---|---|---|
| Acidothermus cellulolyticus 11B | Acidothermaceae | extremophile (hot water spring) |
| Actinomyces coleocanis | Actinomycetaceae | dog genital tract |
| Actinomyces georgiae F0490 | Actinomycetaceae | oral cavity |
| Actinomyces naeslundii str. Howell 279 | Actinomycetaceae | oral cavity |
| Actinomyces sp. ICM47 | Actinomycetaceae | ND |
| Actinomyces sp. oral taxon 175 str. F0384 | Actinomycetaceae | oral cavity |
| Actinomyces sp. oral taxon 180 str. F0310 | Actinomycetaceae | oral cavity |
| Actinomyces sp. oral taxon 181 str. F0379 | Actinomycetaceae | oral cavity |
| Actinomyces sp. oral taxon 848 str. F0332 | Actinomycetaceae | oral cavity |
| Actinomyces turicensis ACS-279-V-Col4 | Actinomycetaceae | genital tract |
| Bifidobacterium bifidum S17 | Bifidobacteriaceae | gastrointestinal tract/feces |
| Bifidobacterium dentium Bd1 | Bifidobacteriaceae | oral cavity |
| Bifidobacterium longum DJO10A | Bifidobacteriaceae | gastrointestinal tract/feces |
| Bifidobacterium sp. 12_1_47BFAA | Bifidobacteriaceae | gastrointestinal tract/feces |
| Corynebacterium accolens ATCC 49726 | Corynebacterineae | wound |
| Corynebacterium diphteriae NCTC 13129 | Corynebacterineae | oral cavity |
| Corynebacterium matruchotii ATCC 14266 | Corynebacterineae | oral cavity |
| Gardnerella vaginalis 5-1 | Bifidobacteriaceae | genital tract |
| Mobiluncus curtisii ATCC 35242 | Actinomycetaceae | genital tract |
| Mobiluncus mulieris 28-1 | Actinomycetaceae | genital tract |
| Scardovia inopinata F0304 | Bifidobacteriaceae | oral cavity |
| Scardovia wiggsiae F0424 | Bifidobacteriaceae | oral cavity |

Coriobacteridae

| | | |
|---|---|---|
| Coriobactetium glomerans PW2 | Coriobacteriaceae | invertebrate (red soldier bug) |
| Eggerthella sp. YY7918 | Coriobacteriaceae | gastrointestinal tract/feces |
| Gordonibacter pamelaeae 7-10-1-b | Coriobacteriaceae | gastrointestinal tract/feces |
| Olsenella uli DSM 7084 | Coriobacteriaceae | oral cavity |

Bacteroidetes
Bacteroidia

| | | |
|---|---|---|
| Anaerophaga sp. HS1 | Marinilabiliaceae | extremophile (hot water spring) |
| Anaerophaga thermohalophila DSM 12881 | Marinilabiliaceae | environmental sample (oil residue) |
| Bacteroides cellulosilyticus DSM 14838 | Bacteroidaceae | gastrointestinal tract/feces |
| Bacteroides coprophilus DSM 18228 | Bacteroidaceae | gastrointestinal tract/feces |
| Bacteroides coprosuis DSM 18011 | Bacteroidaceae | pig feces |
| Bacteroides dorei DSM 17855 | Bacteroidaceae | gastrointestinal tract/feces |
| Bacteroides eggerthii 1_2_48FAA | Bacteroidaceae | gastrointestinal tract/feces |
| Bacteroides faecis MAJ27 | Bacteroidaceae | gastrointestinal tract/feces |
| Bacteroides fluxus YIT 12057 | Bacteroidaceae | gastrointestinal tract/feces |
| Bacteroides fragilis NCTC9343 | Bacteroidaceae | gastrointestinal tract/feces |
| Bacteroides nordii CL02T12C05 | Bacteroidaceae | gastrointestinal tract/feces |
| Bacteroides oleiciplenus YIT 12058 | Bacteroidaceae | gastrointestinal tract/feces |
| Bacteroides sp. 2_1_16 | Bacteroidaceae | gastrointestinal tract/feces |
| Bacteroides sp. 203 | Bacteroidaceae | gastrointestinal tract/feces |
| Bacteroides sp. 3_1_19 | Bacteroidaceae | gastrointestinal tract/feces |
| Bacteroides sp. 3_1_33FM | Bacteroidaceae | gastrointestinal tract/feces |
| Bacteroides sp. 9_1_42FAA | Bacteroidaceae | gastrointestinal tract/feces |
| Bacteroides sp. D2 | Bacteroidaceae | gastrointestinal tract/feces |
| Bacteroides uniformis CL03T00C23 | Bacteroidaceae | gastrointestinal tract/feces |
| Bacteroides vulgatus CL09T03C04 | Bacteroidaceae | gastrointestinal tract/feces |
| Bacteroidetes oral taxon 274 str. F0058 | Bacteroidaceae | oral cavity |
| Barnesiella intestinihominis YIT 11860 | Bacteroidaceae | gastrointestinal tract/feces |

Bacteroidia (continued)

| | | |
|---|---|---|
| Marinilabilia sp. AK2 | Marinilabiliaceae | extremophile (solar saltern) |
| Odoribacter laneus YIT 12061 | Porphyromonadaceae | gastrointestinal tract/feces |
| Parabacteroides johnsonii DSM 18315 | Bacteroidaceae | gastrointestinal tract/feces |
| Parabacteroides sp. D13 | Bacteroidaceae | gastrointestinal tract/feces |
| Porphyromonas catoniae F0037 | Porphyromonadaceae | oral cavity |
| Porphyromonas sp. oral taxon 279 str. F0450 | Porphyromonadaceae | oral cavity |
| Prevotella bivia JCVIHMP010 | Prevotellaceae | genital tract |
| Prevotella buccae ATCC 33574 | Prevotellaceae | oral cavity |
| Prevotella buccalis ATCC 35310 | Prevotellaceae | oral cavity |
| Prevotella denticola F0289 | Prevotellaceae | oral cavity |
| Prevotella disiens FB035-09AN | Prevotellaceae | oral cavity |
| Prevotella histicola F0411 | Prevotellaceae | oral cavity |
| Prevotella intermedia 17 | Prevotellaceae | oral cavity |
| Prevotella melaninogenica D18 | Prevotellaceae | oral cavity/rumen |
| Prevotella micans F0438 | Prevotellaceae | oral cavity |
| Prevotella multiformis DSM 16608 | Prevotellaceae | oral cavity |
| Prevotella nigrescens ATCC 33563 | Prevotellaceae | oral cavity |
| Prevotella oralis ATCC 33269 | Prevotellaceae | oral cavity |
| Prevotella oulorum F0390 | Prevotellaceae | oral cavity |
| Prevotella ruminicola 23 | Prevotellaceae | rumen |
| Prevotella saccharolytica F0055 | Prevotellaceae | oral cavity |
| Prevotella sp. C561 | Prevotellaceae | oral cavity |
| Prevotella sp. MSX73 | Prevotellaceae | oral cavity |
| Prevotella sp. oral taxon 306 str. F0472 | Prevotellaceae | oral cavity |
| Prevotella sp. oral taxon 317 str. F0108 | Prevotellaceae | oral cavity |
| Prevotella sp. oral taxon 472 str. F0295 | Prevotellaceae | oral cavity |
| Prevotella stercorea DSM 18206 | Prevotellaceae | gastrointestinal tract/feces |
| Prevotella tannerae ATCC 51259 | Prevotellaceae | oral cavity |
| Prevotella timonensis CRIS 5C-B1 | Prevotellaceae | wound (breast abscess) |
| Prevotella veroralis F0319 | Prevotellaceae | oral cavity |
| Tannerella sp. 6_1_58FAA_CT1 | Porphyromonadaceae | gastrointestinal tract/feces |

Cytophagia

| | | |
|---|---|---|
| Belliella baltica DSM 15883 | Cyclobacteriaceae | environmental sample (groundwater) |
| Indibacter alkaliphilus LW1 | Cyclobacteriaceae | extremophile (soda lake) |
| Nitritalea halalkaliphila LW7 | Cyclobacteriaceae | extremophile (saline soda lake) |

Flavobacteria

| | | |
|---|---|---|
| Bergeyella zoohelcum ATCC 43767 | Flavobacteriaceae | oral cavity |
| Capnocytophaga canimorsus Cc5 | Flavobacteriaceae | dog and cat oral cavity/zoonotic infections |
| Capnocytophaga gingivalis ATCC 33624 | Flavobacteriaceae | oral cavity |
| Capnocytophaga ochracea DSM 7271 | Flavobacteriaceae | oral cavity |
| Capnocytophaga sp. CM59 | Flavobacteriaceae | oral cavity |
| Capnocytophaga sp. oral taxon 324 str. F0483 | Flavobacteriaceae | oral cavity |
| Capnocytophaga sp. oral taxon 326 str. F0382 | Flavobacteriaceae | oral cavity |
| Capnocytophaga sp. oral taxon 329 str. F0087 | Flavobacteriaceae | oral cavity |
| Capnocytophaga sp. oral taxon 335 str. F0486 | Flavobacteriaceae | oral cavity |
| Capnocytophaga sp. oral taxon 380 str. F0488 | Flavobacteriaceae | oral cavity |
| Capnocytophaga sp. oral taxon 412 str. F0487 | Flavobacteriaceae | oral cavity |
| Capnocytophaga sputigena ATCC 33612 | Flavobacteriaceae | oral cavity |
| Chryseobacterium sp. CF314 | Flavobacteriaceae | vegetation |
| Flavobacteriaceae bacterium S85 | Flavobacteriaceae | environmental sample (seawater) |
| Flavobacterium branchiophilum FL-15 | Flavobacteriaceae | fish pathogen |
| Flavobacterium columnare ATCC 49512 | Flavobacteriaceae | fish pathogen |
| Flavobacterium psychrophilum JIP02/86 | Flavobacteriaceae | fish pathogen |
| Fluviicola taffensis DSM 16823 | Cryomorphaceae | environmental sample (fresh water) |
| Galbibacter sp. ck-I2-15 | Flavobacteriaceae | extremophile (deep sea sediment) |
| Joostella marina DSM 19592 | Flavobacteriaceae | environmental sample (seawater) |
| Kordia algicida OT-1 | Flavobacteriaceae | environmental sample (seawater) |
| Myroides injenensis M09-0166 | Flavobacteriaceae | human clinical specimens |
| Myroides odoratus DSM 2801 | Flavobacteriaceae | fish |

Flavobacteria (continued)

| | | |
|---|---|---|
| Omithobacterium rhinotracheale DSM 15997 | Flavobacteriaceae | bird respiratory tract |
| Psychroflexus torquis ATCC 700755 | Flavobacteriaceae | extremophile (antarctic ice) |
| Riemerella anatipesfifer ATCC 11845 = DSM 15868 | Flavobacteriaceae | bird |
| Weeksella virosa DSM 16922 | Flavobacteriaceae | genital tract/urine |
| Zunongwangia profunda SM-A87 | Flavobacteriaceae | extremophile (deep sea sediment) |

Sphingobacteria

| | | |
|---|---|---|
| Mucilaginibacter paludis DSM 18603 | Sphingobacteriaceae | food (fermented) |
| Niabella soli DSM 19437 | Chitinophagaceae | environmental sample (soil) |
| Sphingobacterium spiritivorum ATCC 33861 | Sphineobacteriaceae | human clinical specimens |

Firmicutes
Bacilli

| | | |
|---|---|---|
| Alicycliphilus denitrificans | Alicyclobacillaceae | environmental sample (sewage) |
| Alicyclobacillus hesperidum URH17-3-68 | Alicyclobacillaceae | extremophile (hot water spring) |
| Bacillus cereus Rock1-15 | Bacillaceae | environmental sample (soil) |
| Bacillus smithii 7 3 47FAA | Bacillaceae | human clinical specimens |
| Bacillus thuringiensis serovar finitimus YBT-020 | Bacillaceae | environmental sample (soil) |
| Brevibacillus laterosporus GI-9 | Paenibacillaceae | environmental sample (soil) |
| Catellicoccus marimammalium M35/04/3 | Enterococcaceae | grey seal gastrointestinal tract |
| Dolosigranulum pigrum ATCC 51524 | Carnobacteriaceae | human clinical specimens |
| Enterococcus faecalis TX0012 | Enterococcaceae | gastrointestinal tract/feces |
| Enterococcus faecium 1231408 | Enterococcaceae | gastrointestinal tract/feces |
| Enterococcus hirae ATCC 9790 | Enterococcaceae | gastrointestinal tract/feces |
| Enterococcus italicus DSM 15952 | Enterococcaceae | food (fermented) |
| Enterococcus sp. 7L76 | Enterococcaceae | gastrointestinal tract/feces |
| Facklamia hominis CCUG 36813 | Aerococcaceae | burbuncle (human) |
| Fructobacillus fructosus KCTC 3544 | Leuconostocaceae | vegetation |
| Gemella haemolysans ATCC 10379 | Streptococcaceae | oral cavity |
| Gemella moribillum M424 | Streptococcaceae | gastrointestinal tract/feces |
| Lactobacillus animalis KCTC 3501 | Lactobacillaceae | food (fermented) |
| Lactobacillus brevis subsp. gravesensis ATCC 27305 | Lactobacillaceae | food (fermented) |
| Lactobacillus buchneri ATCC 11577 | Lactobacillaceae | food (fermented) |
| Lactobacillus casei str. Zhang | Lactobacillaceae | gastrointestinal tract/feces |
| Lactobacillus coryniformis subsp. coryniformis KCTC 3167 | Lactobacillaceae | food (fermented) |
| Lactobacillus coryniformis subsp. torquens KCTC 3535 | Lactobacillaceae | food (fermented) |
| Lactobacillus crispatus FB049-03 | Lactobacillaceae | genital tract |
| Lactobacillus curvatus CRL 705 | Lactobacillaceae | food (fermented) |
| Lactobacillus delbrueckii subsp. bulgaricus 2038 | Lactobacillaceae | food (fermented) |
| Lactobacillus farciminis KCTC 3681 | Lactobacillaceae | food (fermented) |
| Lactobacillus fermentum ATCC 14931 | Lactobacillaceae | food (fermented) |
| Lactobacillus florum 2F | Lactobacillaceae | vegetation |
| Lactobacillus gasseri JV-V03 | Lactobacillaceae | oral cavity |
| Lactobacillus hominis CRBIP 24.179 | Lactobacillaceae | gastrointestinal tract/feces |
| Lactobacillus iners LactinV 11V1-d | Lactobacillaceae | genital tract/urine |
| Lactobacillus jensenii 269-3 | Lactobacillaceae | genital tract/blood |
| Lactobacillus johnsonii DPC 6026 | Lactobacillaceae | pig gastrointestinal tract |
| Lactobacillus mucosae LM1 | Lactobacillaceae | wild pig gastrointestinal tract |
| Lactobacillus paracasei subsp. paracasei 8700:2 | Lactobacillaceae | food (fermented) |
| Lactobacillus pentosus IG1 | Lactobacillaceae | food (fermented) |
| Lactobacillus plantarum ZJ316 | Lactobacillaceae | gastrointestinal tract/feces |
| Lactobacillus rhamnosus GG | Lactobacillaceae | gastrointestinal tract/feces |
| Lactobacillus ruminis ATCC 25644 | Lactobacillaceae | rumen |
| Lactobacillus salivarius UCC118 | Lactobacillaceae | oral cavity |
| Lactobacillus sanfranciscensis TMW 1-1304 | Lactobacillaceae | food (fermented) |
| Lactobacillus sp. 66c | Lactobacillaceae | ND |
| Lactobacillus versmoldensis KCTC 3814 | Lactobacillaceae | food (fermented) |
| Leuconostoc gelidum KCTC 3527 | Leuconostocaceae | food (fermented) |
| Leuconostoc pseudomesenteroides 4882 | Leuconostocaceae | food fermented |

Bacilli (continued)

| | | |
|---|---|---|
| Listeria innocua Clip11262 | Listeriaceae | environmental sample (soil) |
| Listeria ivanovii FSL F6-596 | Listeriaceae | animal and human/environmental samples |
| Listeria monocytogenes str. 1/2a F6854 | Listeriaceae | animal and human/environmental samples |
| Listeria seeligeri FSL N1-067 | Listeriaceae | animal and human/environmental samples |
| Listeriaceae bacterium TTU M1-001 | Listeriaceae | environmental sample (soil) |
| Oenococcus kitaharae DSM 17330 | Leuconostocaceae | food (fermented) |
| Pediococcus acidilactici DSM 20284 | Lactobacillaceae | vegetation |
| Pediococcus lolii NGRI 0510Q | Lactobacillaceae | vegetation (fermented) |
| Planococcus antarcticus DSM 14505 | Planococcaceae | extremophile (antarctic) |
| Sporolactobacillus vineae DSM 21990 = SL153 | Sporolactobacillaceae | environmental sample (soil) |
| Staphylococcus aureus subsp. aureus | Staphylococcaceeae | human clinical specimens |
| Staphylococcus lugdunensis M23590 | Staphylococcaceeae | human clinical specimens |
| Staphylococcus massiliensis S46 | Staphylococcaceeae | skin |
| Staphylococcus pseudintermedius ED99 | Staphylococcaceeae | dog skin |
| Staphylococcus simulans ACS-120-V-Sch1 | Staphylococcaceeae | genital tract |
| Streptococcus agalactiae 2603V/R | Streptococcaceae | gastrointestinal tract/feces |
| Streptococcus anginosus F0211 | Streptococcaceae | oral cavity |
| Streptococcus bovis ATCC 700338 | Streptococcaceae | rumen/zoonotic infections |
| Streptococcus canis FSL Z3-227 | Streptococcaceae | food (fermented) |
| Streptococcus constellatus subsp. constellatus SK53 | Streptococcaceae | human clinical specimens |
| Streptococcus downei F0415 | Streptococcaceae | monkey oral cavity |
| Streptococcus dysgalactiae DSM 12112 | Streptococcaceae | various animals/zoonotic infections |
| Streptococcus equi subsp. zooepidemicus MGCS10565 | Streptococcaceae | horse respiratory tract |
| Streptococcus equinus ATCC 9812 | Streptococcaceae | ruminants alimentary tract |
| Streptococcus gallolyticus UCN34 | Streptococcaceae | ruminants alimentary tract |
| Streptococcus gordonii str. Challis substr. CH1 | Streptococcaceae | oral cavity |
| Streptococcus infantarius ATCC BAA-102 | Streptococcaceae | gastrointestinal tract/feces |
| Streptococcus iniae 9117 | Streptococcaceae | fish/human pathogen |
| Streptococcus macacae NCTC 11558 | Streptococcaceae | monkey oral cavity |
| Streptococcus macedonicus ACA-DC 198 | Streptococcaceae | food (fermented) |
| Streptococcus mitis ATCC 6249 | Streptococcaceae | oral cavity |
| Streptococcus mutans UA159 | Streptococcaceae | oral cavity |
| Streptococcus oralis SK1074 | Streptococcaceae | oral cavity |
| Streptococcus parasanguinis F0449 | Streptococcaceae | oral cavity |
| Streptococcus pasteurianus ATCC 43144 | Streptococcaceae | blood |
| Streptococcus pseudoporcinus SPIN 20026 | Streptococcaceae | genital tract |
| Streptococcus pyogenes SF370 | Streptococcaceae | oral cavity/wounds |
| Streptococcus ratti FA-1 = DSM 20564 | Streptococcaceae | rat oral cavity |
| Streptococcus salivarius JIM8777 | Streptococcaceae | oral cavity |
| Streptococcus sanguinis VMC66 | Streptococcaceae | oral cavity |
| Streptococcus sp. BS35b | Streptococcaceae | oral cavity |
| Streptococcus sp. C150 | Streptococcaceae | oral cavity (expectorated sputum) |
| Streptococcus sp. C300 | Streptococcaceae | oral cavity (expectorated sputum) |
| Streptococcus sp. F0441 | Streptococcaceae | oral cavity |
| Streptococcus sp. GMD4S | Streptococcaceae | oral cavity |
| Streptococcus sp. GMD6S | Streptococcaceae | oral cavity |
| Streptococcus sp. M334 | Streptococcaceae | oral cavity (expectorated sputum) |
| Streptococcus sp. oral taxon 056 str. F0418 | Streptococcaceae | oral cavity |
| Streptococcus sp. oral taxon 071 str. 73H25AP | Streptococcaceae | oral cavity |
| Streptococcus suis 89/1591 | Streptococcaceae | pig |
| Streptococcus thermophilus LMD-9 | Streptococcaceae | food (fermented) |
| Streptococcus vestibularis ATCC 49124 | Streptococcaceae | oral cavity |

Clostridia

| | | |
|---|---|---|
| Acidaminococcus intestini RyC-MR95 | Acidaminococcaceae | wound/abscess |
| Acidaminococcus sp. D21 | Acidaminococcaceae | gastrointestinal tract/feces |
| Aminomonas paucivorans DSM 12260 | Syntrophoomonadaceae | environmental sample (sewage) |
| Anaerococcus tetradius ATCC 35098 | Peptostreptococcaceae | human clinical specimens |
| Butyrivibrio fibrisolvens 16/4 | Lachnospiraceae | rumen |
| Catenibacterium mitsuokai DSM 15897 | Lachnospiraceae | gastrointestinal tract/feces |
| Clostridium cellulolyticum H10 | Clostridiaceae | vegetation (composted) |

Clostridia (continued)

| | | |
|---|---|---|
| Clostridium perfringens D str. JGS1721 | Clostridiaceae | environmental sample (vegetation/marine sediment) |
| Clostridium spiroforme DSM 1552 | Clostridiaceae | gastrointestinal tract/feces |
| Coprococcus catus GD/7 | Lachnospiraceae | gastrointestinal tract/feces |
| Coprococcus comes ATCC 27758 | Lachnospiraceae | gastrointestinal tract/feces |
| Dorea longicatena DSM 13814 | Clostridiaceae | gastrointestinal tract/feces |
| Eubacterium dolichum DSM 3991 | Eubacteriaceae | gastrointestinal tract/feces |
| Eubacterium rectale ATCC 33656 | Eubacteriaceae | gastrointestinal tract/feces |
| Eubacterium sp. AS15 | Eubacteriaceae | oral cavity |
| Eubacterium ventriosum ATCC 27560 | Eubacteriaceae | gastrointestinal tract/feces |
| Eubacterium yurii subsp. margaretiae ATCC 43715 | Peptostreptococcaceae | oral cavity |
| Filifactor alocis ATCC 35896 | Peptostreptococcaceae | cat and human oral cavity |
| Finegoldia magna ATCC 29328 | Peptostreptococcaceae | oral cavity |
| Helcococcus kunzii ATCC 51366 | Clostridiales Family XI | wound |
| Oribacterium sinus F0268 | Lachnospiraceae | human clinical specimens |
| Peptoniphilus duerdenii ATCC BAA-1640 | Peptostreptococcaceae | wound |
| Peptoniphilus sp. oral taxon 386 str. F0131 | Peptostreptococcaceae | oral cavity |
| Phascolarctobacterium sp. YIT 12067 | Acidaminococcaceae | gastrointestinal tract/feces |
| Phascolarctobacterium succinatutens YIT 12067 | Acidaminococcaceae | gastrointestinal tract/feces |
| Pseudoramibacter alactolyticus ATCC 23263 | Clostridiaceae | oral cavity |
| Roseburia intestinalis L1-82 | Lachnospiraceae | gastrointestinal tract/feces |
| Roseburia inulinivorans DSM 16841 | Lachnospiraceae | gastrointestinal tract/feces |
| Ruminococcus albus 8 | Ruminococcaceae | gastrointestinal tract/feces |
| Ruminococcus lactaris ATCC 29176 | Ruminococcaceae | gastrointestinal tract/feces |
| Subdoligranulum sp. 4_3_54A2FAA | Ruminococcaceae | gastrointestinal tract/feces |

Negativicutes

| | | |
|---|---|---|
| Megasphaera sp. UPII 135-E | Veillonellaceae | rumen |
| Veillonella atypica ACS-134-V-Col7a | Veillonellaceae | oral cavity |
| Veillonella parvula ATCC17745 | Veillonellaceae | gastrointestinal/genital tract |
| Veillonella sp. 6_1_27 | Veillonellaceae | gastrointestinal tract/feces |
| Veillonella sp. oral taxon 780 str. F0422 | Veillonellaceae | oral cavit |

Proteobacteria
Alphaproteobacteria

| | | |
|---|---|---|
| Acetobacter aceti NBRC 14818 | Acetobacteraceae | environmental sample |
| Azospirillum sp. B510 | Rhodospirillaceae | vegetation |
| Bradyrhizobium sp. BTAi1 | Bradyrhizobiaceae | vegetation |
| Caenispirillum salinarum AK4 | Rhodospirillaceae | extremophile (solar saltern) |
| Dinoroseobacter shibae DFL 12 | Rhodobacteraceae | environmental sample (seawater) |
| Gluconacetobacter diazotrophicus PAI5 | Acetobacteriaceae | vegetation |
| Maritimibacter alkaliphilus ATCC2654 | Rhodobacteraceae | environmental sample (seawater) |
| Methylocystis sp. ATCC 49242 | Methylocystaceae | environmental sample (sewage, fresh water) |
| Methylosinus trichosporium OB3b | Methylocystaceae | environmental sample (soil, fresh water) |
| Nitrobacter hamburgensis X14 | Bradyrhizobiaceae | environmental sample (soil) |
| Parvibaculum lavamentivorans DS-1 | Phyllobacteriaceae | environmental sample (sewage) |
| Puniceispirillum marinum IMCC1322 | SAR16 Glade | environmental sample (seawater) |
| Rhodopseudomonas palustris BisB18 | Bradyrhizobiaceae | environmental sample (soil) |
| Rhodospirillum rubrum ATCC 11170 | Rhodospirillaceae | environmental sample (sea mud) |
| Rhodovulum sp. PH10 | Rhodobacteraceae | environmental sample (soil) |
| Sphingobium sp. AP49 | Sphingomonadaceae | vegetation |
| Sphingomonas sp. S17 | Sphingomonadaceae | environmental sample (stromatolite) |
| Tistrella mobilis KA081020-065 | Rhodospirillaceae | environmental sample (seawater) |

Betaproteobacteria

| | | |
|---|---|---|
| Acidovorax avenae subsp. avenae ATCC 19860 | Comamonadaceae | environmental sample (soil) |
| Acidovorax ebreus TPSY | Comamonadaceae | environmental sample (water) |
| Burkholderiales bacterium 1 1 47 | Burkholderiales | gastrointestinal tract/feces |
| Kingella kingae ATCC 23330 | Neisseriaceae | oral cavity |
| Neisseria bacilliformis ATCC BAA-1200 | Neisseriaceae | oral cavity |

Betaproteobacteria (continued)

| | | |
|---|---|---|
| Neisseria cinema ATCC 14685 | Neisseriaceae | oral cavity |
| Neisseria flavescens SK114 | Neisseriaceae | human clinical specimens |
| Neisseria lactamica 020-06 | Neisseriaceae | oral cavity |
| Neisseria meningitidis A Z2491 | Neisseriaceae | oral cavity |
| Neisseria mucosa C102 | Neisseriaceae | oral cavity (expectorated sputum) |
| Neisseria sp. oral taxon 014 str. F0314 | Neisseriaceae | oral cavity |
| Neisseria subflava NJ9703 | Neisseriaceae | oral cavity |
| Neisseria wadsworthii 9715 | Neisseriaceae | skin |
| Nitrosomonas sp. AL212 | Nitrosomonadaceae | environmental sample (fresh water) |
| Parasutterella excrementihominis YIT 11859 | Alcaligenaceae | gastrointestinal tract/feces |
| Ralstonia syzygii R24 | Burkholderiaceae | environmental sample (soil) |
| Simonsiella muelleri ATCC 29453 | Neisseriaceae | oral cavity |
| Sutterella parvirubra YIT 11816 | Alcaligenaceae | gastrointestinal tract/feces |
| Sutterella wadsworthensis 3 1 45B | Alcaligenaceae | gastrointestinal tract/feces |
| Verminephrobacter aporrectodeae subsp. tuberculatae At4 | Comamonadaceae | invertebrate (earthworm) |
| Verminephrobacter eiseniae EF01-2 | Comamonadaceae | invertebrate (earthworm) |

Gammaproteobacteria

| | | |
|---|---|---|
| Actinobacillus minor NM305 | Pasteurellaceae | pig respiratory tract |
| Actinobacillus pleuropneumoniae serovar 10 D13039 | Pasteurellaceae | pig respiratory tract |
| Actinobacillus succinogenes 130Z | Pasteurellaceae | rumen |
| Actinobacillus suis H91-0380 | Pasteurellaceae | pig pathogen |
| Actinobacillus ureae ATCC 25976 | Pasteurellaceae | respiratory tract |
| Alcanivorax sp. W11-5 | Alcanivoracaceae | extremophile (deep sea sediment) |
| Francisella tularensis subsp. holarctica LVS | Francisellaceae | engineered live vaccine strain |
| Francisella tularensis subsp. novicida U112 | Francisellaceae | human/environmental sample (water) |
| Francisella tularensis subsp. tularensis WY96-3418 | Francisellaceae | wound |
| gamma proteobacterium HTCC5015 | Unclassified | environmental sample (seawater) |
| gammaproteobacterium HdN1 | Unclassified | environmental sample (sewage) |
| Haemophilus parainfluenzae T3T1 | Pasteurellaceae | oral cavity/genital tract |
| Haemophilus pittmaniae HK 85 | Pasteurellaceae | oral cavity |
| Haemophilus sputorum HK 2154 | Pasteurellaceae | oral cavity |
| Legionella pneumophila str. Paris | Legionellaceae | human clinical specimens |
| Pasteurella bettyae CCUG 2042 | Pasteurellaceae | genital tract |
| Pasteurella multocida subsp. gallicida X73 | Pasteurellaceae | bird pathogen |
| Pasturella multocida Pm70 | Pasteurellaceae | bird respiratory tract/zoonotic infections |

Deltaproteobacteria

| | | |
|---|---|---|
| uncultured delta proteobacterium HF0070_07E19 | Unclassified | environmental sample (seawater) |

Epsilonproteobacteria

| | | |
|---|---|---|
| Campylobacter coli 2962 | Campylobacteraceae | animals/human pathogen |
| Campylobacter jejuni NCTC11168 | Campylobacteraceae | bird |
| Campylobacter jejuni subsp. doylei 269-97 | Campylobacteraceae | blood |
| Campylobacter lari | Campylobacteraceae | gastrointestinal tract/feces |
| Helicobacter canadensis MIT 98-5491 | Helicobacteriaceae | gastrointestinal tract/feces |
| Helicobacter cinaedi CCUG 18818 | Helicobacteriaceae | gastrointestinal tract/feces |
| Helicobacter hepaticus ATCC 51449 | Helicobacteriaceae | mouse liver |
| Helicobacter mustelae 12198 | Helicobacteriaceae | ferret |
| Helicobacter pullorum MIT 98-5489 | Helicobacteriaceae | bird/zoonotic infections |
| Nitratifractor salsuginis DSM 16511 | Unclassified | extremophile (deep sea sediment) |
| Wolinella succinogenes DSM 1740 | Helicobacteraceae | rumen |

Fusobacteria

| | | |
|---|---|---|
| Fusobacterium nucleatum subsp. vincentii ATCC 49256 | Fusobacteriaceae | oral cavity |
| Fusobacterium sp. 1_1_41FAA | Fusobacteriaceae | gastrointestinal tract/feces |
| Fusobacterium sp. 3_1_27 | Fusobacteriaceae | gastrointestinal tract/feces |
| Fusobacterium sp. 3_1_36A2 | Fusobacteriaceae | gastrointestinal tract/feces |
| Ilyobacter polytropus DSM 2926 | Fusobacteriaceae | environmental sample (sea mud) |
| Streptobacillus moniliformis DSM 12112 | Leptotrichiaceae | rodent/human pathogen |

Spirochaetes

| | | |
|---|---|---|
| Leptospira inadai serovar Lyme str. 10 | Leptospiraceae | human clinical specimens |
| Sphaerochaeta globus str. Buddy | Spirochaetaceae | extremophile (marine hot spring) |
| Treponema denticola ATCC 35405 | Spirochaetaceae | oral cavity |
| Treponema phagedenis F0421 | Spirochaetaceae | monkey genital tracts |
| Treponema sp. JC4 | Spirochaetaceae | rumen |
| Treponema vincentii ATCC 35580 | Spirochaetaceae | oral cavit |

Tenericutes
Mollicutes

| | | |
|---|---|---|
| Mycoplasma canis PG 14 | Mycoplasmataceae | dog oral cavity |
| Mycoplasma cynos C142 | Mycoplasmataceae | dog respiratory tract |
| Mycoplasma gallisepticum str. F | Mycoplasmataceae | bord pathogen |
| Mycoplasma iowae 695 | Mycoplasmataceae | bird |
| Mycoplasma mobile 163K | Mycoplasmataceae | fish pathogen |
| Mycoplasma ovipneumoniae SC01 | Mycoplasmataceae | goat respiratory tract |
| Mycoplasma synoviae 53 | Mycoplasmataceae | bird pathogen |
| Solobacterium moorei F0204 | Erysipelotrichaceae | gastrointestinal tract/feces |

Elusimicrobia

| | | |
|---|---|---|
| Elusimicrobium minutum Pei191 | Elusimicrobiaceae | invertebrate (scarab beetle) |
| Uncultured Termite group 1 bacterium phylotype Rs-D17 | Elusimicrobiaceae | invertebrate |

Fibrobacteres

| | | |
|---|---|---|
| Fibrobacter succinogenes S85 | Fibrobacteraceae | rumen |

Ignavibacteria

| | | |
|---|---|---|
| Ignavibacterium album JCM 16511 | Ignavibacteriaceae | extremophile (hot water spring) |

Planktomycetes

| | | |
|---|---|---|
| Blastopirellula marina DSM 3645 | Planctom cetaceae | environmental sample seawater |

Verrucomicrobia

| | | |
|---|---|---|
| Diplosphaera colitermitum TAV2 | Opitutaceae | invertebrate (termite) |
| Akkermansia muciniphila ATCC BAA-835 | Verrucomicrobiaceae | gastrointestinal tract/feces |

Unclassified

| | | |
|---|---|---|
| candidate division TM7 single-cell isolate TM7c | Unclassified | oral cavity |
| uncultured bacterium | Unclassified | environmental sample (groundwater) |
| uncultured bacterium | Unclassified | environmental sample (groundwater) |
| uncultured bacterium T3_7_42578 | Unclassified | invertebrate (honeybee) |

^{a}Single strains representing every species found to harbor the cas9 gene are listed.
^{b}The origin of the specific strain and/or typical habitat of the species are given for every strain.
ND, no data available.
Note
that if not specified otherwise, isolates from body sites and feces are human commensals and pathogens.

Supplementary Table S5-tracrRNA and CRISPR repeats associated with
the examined type II CRISPR-Cas systems.

| | Cas9 tree | | | Number of | tracrRNA | Repeat |
|---|---|---|---|---|---|---|
| strain | position^{a} | tracrRNA sequence^{b} | Repeat^{c} | repeats^{d} | length | length^{e} |
| Francisella | 1 | AUCUAAAAUUAUAAAUGU | GUUUCAGUUGCUGAAUU | 14 | 90 | 37 |
| novicida | | ACCAAAUAAUUAAUGCUC | AUUUGGUAAACUACUGU | | | |
| U112 | | UGUAAUCAUUUAAAAGUA | UAG | | | |
| | | UUUUGAACGGACCUCUGU | (SEQ ID NO: 2765) | | | |
| | | UUGACACGUCUGAAUAAC | | | | |
| | | (SEQ ID NO: 2702) | | | | |
| Gamma | 2 | UCAGAAUGCAUCCCAACA | GUUUCAGCUGUUGGUUU | 27 | 88 | 37 |
| proteobacte | | UUCUAUACACUGAAAUCA | GUUGGGAUAAGCUCUGA | | | |
| riuam | | UAGAAAAUCACGUUUGUG | AAC | | | |
| HTCC5015 | | GCCCGACCAACUGCUUCG | (SEQ ID NO: 2766) | | | |
| | | GCAUGUCGGGUUUUUU | | | | |
| | | (SEQ ID NO: 2703) | | | | |
| Parasutterela | 3 | UUAAUUACAUUCUUUUAA | GUUUCAGUAGUUGUUAG | >2 | 129 | 37 |
| excrementi- | | CAACGAAGUCGCCUUCGG | AAGAAUGUAGUAUUGAA | | | |
| hominis | | GCGAGCUGAAAUCAAUUU | GCC | | | |
| YIT11859 | | GAUUAAAUAUUAGAUCCG | (SEQ ID NO: 2767) | | | |
| | | GCUACUGAGGUCUUUGAC | | | | |
| | | CUUAUCCGGAUUAACGAA | | | | |
| | | GAGCCUCCGAGGAGGCUU | | | | |
| | | UUU | | | | |
| | | (SEQ ID NO: 2704) | | | | |
| Sutterella | 4 | UUAGAGAUCAUAACGCUA | GUUUCAGUGCUAUAGCU | 13 | 111 | 37 |
| wadsworthensis | | UGAGCUAUAGGAAAUCAC | CGUAGCGUUAUGAUCUU | | | |
| 3_1_45B | | CUUCGGGUGAGCUGAAAU | CGC | | | |
| | | CCCCUAAAGCUAAGAUUG | (SEQ ID NO: 2768) | | | |
| | | AAUCCGGCCACUAUCUAU | | | | |
| | | UAGUAGAUAUCCGGAUAU | | | | |
| | | UCU | | | | |
| | | (SEQ ID NO: 2705) | | | | |
| Legionella | 5 | UAAAUUAGAAAUCAUCUA | GUUUCAGUGGUUGGAUU | 34 | 100 | 37 |
| pneumophila | | AAUUUCGAUACCCUGAAA | UUUAGAUGAGGGAUUAU | | | |
| str. Paris | | UCAACAAAAUUAAAGAUU | UGG | | | |
| | | GAAUCGUUUUUCUAUGCU | (SEQ ID NO: 2769) | | | |
| | | CGUCUUAAUAGCGAGCAU | | | | |
| | | AUAACGAUUU | | | | |
| | | (SEQ ID NO: 2706) | | | | |
| Wolinella | 6 | UUGUUAGAAUGUUCCCGC | GUUUCACAGGCUAAGCG | 23 | 108 | 37 |
| succinogenes | | AACACUUUAUAGCAAAUC | GAUUUGCUAUAAAGUGU | | | |
| DSM 1740 | | CGUUCGAUGCCUUGAAAU | UGC | | | |
| | | CAUCAAAAAGAUAUAAUA | (SEQ ID NO: 2770) | | | |
| | | GACCCGCCCACUGUAUUG | | | | |
| | | UACAUGGCGGGACUUUUU | | | | |
| | | (SEQ ID NO: 2707) | | | | |
| Staphylococcus | 7 | GUUUUACUUCUUUCUAAA | GUUUUAGCACUAUGUUU | 24 | 99 | 36 |
| pseudintermedius | | UAAACAUAGUUAAGUUAA | AUUUAGAAAGAGGUAAA | | | |
| ED99 | | AACAAGCUUAAAGCGUCA | AC | | | |
| | | AUGUAAUAUUUUAUUAAC | (SEQ ID NO: 2771) | | | |
| | | ACCCUACUGUGUCAGUGG | | | | |
| | | GGUUUUUUU | | | | |
| | | (SEQ ID NO: 2708) | | | | |
| Planococcus | 8 | AUUUCAAAAUAUUCCCCC | GUUUUAGACCAAUGUAA | >5 | 154 | 36 |
| antartcticus | | UUUACAUUUUUCAAAAGA | UUUUAGAGAGUAGUAAA | | | |
| DSM 14505 | | AAAUGUACGCUAAGAGUG | AC | | | |
| | | UUACUACUCUGUAACAUU | (SEQ ID NO: 2772) | | | |
| | | ACAUUGGUACGUUAAAAU | | | | |
| | | AAGCUUAAAGCGUAAAAG | | | | |
| | | UUGGCCCUAUGAGGUCUC | | | | |
| | | CGCCAUCGACUUCGUCGG | | | | |
| | | UGGCUUUUUU | | | | |
| | | (SEQ ID NO: 2709) | | | | |
| Streptococcus | 9 | AACUACGUUGGAACUAUU | GUUUUAGAGCUGUGUUG | 11 | 104 | 36 |
| sanguinis | | CGAAACAACACAGCCAAA | UUUCGAAUGGUUCCAAA | | | |
| SK49 | | AGAUUUUUCUUUUGAGUU | AC | | | |
| | | AAAAUAUGGUUAUCCAUA | (SEQ ID NO: 2773) | | | |
| | | AUCAGUUAUGCGCACCGA | | | | |
| | | UUCGGUGCUUUUUU | | | | |
| | | (SEQ ID NO: 2710) | | | | |
| Listeria | 10 | AUUGUUAGUAUUCAAAAU | GUUUUAGAGCUAUGUUA | 11 | 90 | 36 |
| innocua | | AACAUAGCAAGUUAAAAU | UUUUGAAUGCUAACAAA | | | |
| Clip11262 | | AAGGCUUUGUCCGUUAUC | AC | | | |
| | | AACUUUUAAUUAAGUAGC | (SEQ ID NO: 2774) | | | |
| | | GCUGUUUCGGCGCUUUUU | | | | |
| | | (SEQ ID NO: 2711) | | | | |
| Streptococcus | 10 | GUUGGAACCAUUCAAAAC | GUUUUAGAGCUAUGCUG | 7 | 89 | 36 |
| pyrogenes | | AGCAUAGCAAGUUAAAAU | UUUUGAAUGGUCCCAAA | | | |
| SF370 | | AAGGCUAGUCCGUUAUCA | AC | | | |
| (M1 GAS) | | ACUUGAAAAAGUGGCACC | (SEQ ID NO: 2775) | | | |
| | | GAGUCGGUGCUUUUUUU | | | | |
| | | (SEQ ID NO: 2712) | | | | |
| Streptococcus | 11 | UUGUGGUUUGAAACCAUU | GUUUUAGAGCUGUGUUG | 9 | 96 | 36 |
| thermophilus | | CGAAACAACACAGCGAGU | UUUCGAAUGGUUCCAAA | | | |
| LMD-9 | | UAAAAUAAGGCUUAGUCC | AC | | | |
| | | GUACUCAACUUGAAAAGG | (SEQ ID NO: 2776) | | | |
| | | UGGCACCGAUUCGGUGUU | | | | |
| | | UUUUUU | | | | |
| | | (SEQ ID NO: 2713) | | | | |
| Streptococcus | 12 | GUUGGAAUCAUUCGAAAC | GUUUUAGAGCUGUGUUG | 6 | 102 | 36 |
| mutans | | AACACAGCAAGUUAAAAU | UUUCGAAUGGUUCCAAA | | | |
| UA159 | | AAGGCAGUGAUUUUUAAU | AC | | | |
| | | CCAGUCCGUACACAACUU | (SEQ ID NO: 2777) | | | |
| | | GAAAAAGUGCGCACCGAU | | | | |
| | | UCGGUGCUUUUU | | | | |
| | | (SEQ ID NO: 2714) | | | | |
| Coriobacterium | 13 | CGUCUUGAUUACCAGUCA | GUUUUGGAGCAGUGUCG | 10 | 120 | 36 |
| glomerans | | GGACAGCACUGCGAGUCA | UUCUGACUGGUAAUCCA | | | |
| PW2 | | AAAUACGGCUUUGCCAAA | AC | | | |
| | | CUUGCCUCCCUUCGGAGG | (SEQ ID NO: 2778) | | | |
| | | CGUCUCGUAGGAGACAAU | | | | |
| | | UUGAAGCCCCUUUAGGGG | | | | |
| | | CUUCAUUUUUCU | | | | |
| | | (SEQ ID NO: 2715) | | | | |
| Lactobacillus | 14 | GUUUUACUAUUUCUAGAU | GUUUUUGUACCUUAAAG | 9 | 89 | 36 |
| farciminis | | UCUUUAAGAUCUACAAAA | AAUCUAGAAAUAGUAAA | | | |
| KCTC 3681 | | AUAAGGAUUUAUUCCGAA | AC | | | |
| | | UUUACCACCUAUUUUAAU | (SEQ ID NO: 2779) | | | |
| | | UAAUAGGUGGUUUUUUU | | | | |
| | | (SEQ ID NO: 2716) | | | | |
| Catenibacterium | 15 | Too short contig | GUUUUAGGGUUAUGUUA | >4 | — | 36 |
| mitsuokai | | | UUUUGAACUGAAUUAAA | | | |
| DSM 15897 | | | AC | | | |
| | | | (SEQ ID NO: 2780) | | | |
| Lactobacillus | 16 | UGUUGAGACGACAUCCUC | GUCUCAGGUAGAUGUCA | 25 | 146 | 36 |
| rhamnasus | | AACAACUUGAAUUGAUUG | GAUCAAUCAGUUCAAGA | | | |
| GG | | AUCUGACAUCUACGAGUU | GC | | | |
| | | GAGAUCAAACAAAGCUUC | (SEQ ID NO: 2781) | | | |
| | | AGCUGAGUUUCAAUUUCU | | | | |
| | | GAGCCCAUGUUGGGCCAU | | | | |
| | | ACAUAUGCCACCCGAGUG | | | | |
| | | CAAAUCGGGUGGCUUUUU | | | | |
| | | UU | | | | |
| | | (SEQ ID NO: 2781) | | | | |
| Bifidobacterium | 17 | GGAUUGUUUGGUCGCAAU | GUUUCAGAUGCCUGUCA | 45 | 144 | 36 |
| bifidum | | CCAUGAUCAAGGUCAUUG | GAUCAAUGACUUUGACC | | | |
| S17 | | ACCUGACAGGCAUAAAUU | AC | | | |
| | | GAAAUAAAGCAAGGUUUC | (SEQ ID NO: 2782) | | | |
| | | GACCAAGCUUCAGAAGGU | | | | |
| | | UUUAUACCUGGCCUUAUG | | | | |
| | | GCUGUGAGGCUCCCGAUA | | | | |
| | | AUGUCGGGAGCCUCUUUU | | | | |
| | | (SEQ ID NO: 2719) | | | | |
| Oenococcus | 18 | UUGGGAUUGAUCAUCCCA | GCUUCAGAUGUGUGUCA | 58 | 167 | 36 |
| kitaharae | | AACAUCAUUGGGUUCUAC | GAUCAAUGAGGUAGAAC | | | |
| DSM 17330 | | CUCAUUGAUCUGACACAC | CC | | | |
| | | AGCAUUGAAGUAAAGCAA | (SEQ ID NO: 2783) | | | |
| | | GAUUAAUUUCAAGCUUAA | | | | |
| | | UUUUCUUCACAUUUUAUG | | | | |
| | | UGCAGAAGGGCUUAUGCC | | | | |
| | | CACAAUACAUAAAAAGUC | | | | |
| | | CGCAUUCACUUGCGGACU | | | | |
| | | UUUAU | | | | |
| | | (SEQ ID NO: 2720) | | | | |
| Fructibacillus | | CAUGGUUAGCUACCAUAC | GCUUUAGAUGUAUGUCG | >2 | 149 | 36 |
| fructosus | | AAGCAAGAAUUGUUUAGC | GAUUAAUGGGGUUUCUU | | | |
| KCTC 3544 | | UAACUAUUCUUGCUAGGA | CC | | | |
| | | AGAACCCAUUAAUCUGAC | (SEQ ID NO: 2784) | | | |
| | | AUACAGGGUUAAAGUAAC | | | | |
| | | GCAAGGGCUUCAGCCCAA | | | | |
| | | GCUUCAUGAACUUUUAAA | | | | |
| | | AAGUUGGCCUUAUGGCCU | | | | |
| | | UUUUU | | | | |
| | | (SEQ ID NO: 2721) | | | | |
| Finegoldia | 20 | UAAUCUCAGUUUAAUACC | GUUUGAGAAUGAUGUAA | 15 | 116 | 36 |
| magna | | UAUAUGAGAUUACAUCAU | UUUCAUAUAGGUAUUAA | | | |
| ATCC 29328 | | GAGUUCAAAUAAAAGUUU | AC | | | |
| | | ACUCAAAUCGCCCGAAA | (SEQ ID NO: 2785) | | | |
| | | GAGCCCACAUUGGUGGA | | | | |
| | | CUAAACAAAUCUUCGGA | | | | |
| | | UUUGUUUUUUU | | | | |
| | | (SEQ ID NO: 2722) | | | | |
| Viellonella | 21 | AUAAGUAAUCCAAUUAG | GUUUGCGAGUAGUGUAA | 33 | 129 | 36 |
| atypical | | UUUUGGAGGUUUACAGA | UUCUGUAAAUCUCUAAA | | | |
| ACS-134-V- | | AUUACACUACGAGUUCA | AC | | | |
| Co17a | | AAUACAAAUUUAUUUAC | (SEQ ID NO: 2786) | | | |
| | | AAUGCCUUCGGGCCACC | | | | |
| | | CGACGUAGGGUAUCAUC | | | | |
| | | UCAAUUCUUCUGAAUUG | | | | |
| | | GGAUUUUUUU | | | | |
| | | (SEQ ID NO: 2723) | | | | |
| Solobacterium | 22 | GAAAUUGUCUUAUACCA | CUUUGAGAACUAUGUAA | >2 | 120 | 36 |
| moorei | | GUAAGAUAAUUUACAUA | AUUAUGCUGGUAGCAAA | | | |
| F0204 | | GUAAGUUCAAACAAGCU | AC | | | |
| | | UUUAGCGAAAUUACCGC | (SEQ ID NO: 2787) | | | |
| | | UUUGCGGAUUCACAUUG | | | | |
| | | UGUGAAGUUAACUCUCG | | | | |
| | | AAAGAGAGUUUUUUCUU | | | | |
| | | U | | | | |
| | | (SEQ ID NO: 2724) | | | | |
| Acidaminococcus | 23 | none | GUUUGAGAGAUAUGUAA | 40 | — | 36 |
| sp. | | | AUUCAAAGGAUAAUCAA | | | |
| D21 | | | AC | | | |
| | | | (SEQ ID NO: 2788) | | | |
| Eubacteriumyurii | 24 | AUAUCAUUAUCAUUGAU | GUUUGAGAACCUUGUAA | 17 | 121 | 36 |
| subsp. | | UUACAAGGUGAGUUCAA | AUCAAUAAGUAUGUAAA | | | |
| Margaretiae | | ACAAGGAUUUAUCCGUA | AC | | | |
| ATCC 43715 | | AUUGAUUGCUCGCAUUG | (SEQ ID NO: 2789) | | | |
| | | UGCGACAUUUUCUUAUG | | | | |
| | | UAAAUCGUGAAGUCGGA | | | | |
| | | CUUUCGACUUCUUUUUU | | | | |
| | | UU | | | | |
| | | (SEQ ID NO: 2725) | | | | |
| Coprococcus | 25 | none | GUUUGAGAAUGAUGUAA | 16 | — | 36 |
| catus | | | AAAUGUAUGGUACUCAA | | | |
| GD/7 | | | GC | | | |
| | | | (SEQ ID NO: 2790) | | | |
| Fusobacterium | 26 | none | GUUUGAGAGUAAUGUUA | >3 | — | 36 |
| nucleotum | | | UUUUAAAUAGAUUCAAA | | | |
| subsp. | | | AC | | | |
| Vincentii | | | (SEQ ID NO: 2791) | | | |
| ATCC 49256 | | | | | | |
| Filifactor | 27 | GUUGACUACCAUAUGAG | GUUUGAGAGUAGUGUAA | 26 | 106 | 36 |
| alocis | | AUUACACUACACGGUUC | UUUCAUAUGGUAGUCAA | | | |
| ATCC 35896 | | AAAUAAAGAAUUUUUCU | AC | | | |
| | | AAUCGCCCAAUGGGCCC | (SEQ ID NO: 2792) | | | |
| | | AUAUUGAUAUGGAUGAA | | | | |
| | | ACUCGCUUAGCGAGUUU | | | | |
| | | UUUU | | | | |
| | | (SEQ ID NO: 2726) | | | | |
| Peptoniphilus | 28 | none | GUUUGAGAGUUAUGUAA | 30 | — | 36 |
| duerdenii | | | UUUCAUAUAGGACUAAA | | | |
| ATCC BAA-1640 | | | AC | | | |
| | | | (SEQ ID NO: 2793) | | | |
| Treponema | 29 | AUUUAAGAUCCAUCUUA | GUUUGAGAGUUGUGUAA | 58 | 115 | 36 |
| denticola | | AAUUACACAACGAGUUC | UUUAAGAUGGAUCUCAA | | | |
| ATCC 35405 | | AAAUAAGAAUUCAUCAA | AC | | | |
| | | AAUCGUCCCUUUUGGGA | (SEQ ID NO: 2794) | | | |
| | | CCGCUCAUUGUGGAGCA | | | | |
| | | UCAAGGCUUAACAUGGU | | | | |
| | | UAAGCCUUUUUUU | | | | |
| | | (SEQ ID NO: 2727) | | | | |
| Staphylococcus | | GUACUUAUACCUAAAAU | GUUUUAGUACUCUGUAA | 3 | 84 | 36 |
| lugenensis | | UACAGAAUCUACUGAAA | UUUUAGGUAUAAGUGAU | | | |
| M23590 | | CAAGACAAUAUGUCGUG | AC | | | |
| | | UUUAUCCCAUCAAUUUA | (SEQ ID NO: 2795) | | | |
| | | UUGGUGGGAUUUUUUU | | | | |
| | | (SEQ ID NO: ) | | | | |
| Eubacterivam | 31 | UGAUCAUAAUCUAGCAA | GUUUUGUUACCAUAUGG | 16 | 92 | 36 |
| dolichum | | AAGUUUAUAUGAUCUAA | AUUUUUGCUAGAUUAAG | | | |
| DSM 2991 | | CAAAACAAGGGUUUAUC | AC | | | |
| | | CCGGAAUCAAGUUCCAA | (SEQ ID NO: 2796) | | | |
| | | GUAUAUGCUUGGAGCUU | | | | |
| | | UUUCUUU | | | | |
| | | (SEQ ID NO: 2728) | | | | |
| Streptococcus | 32 | UGUAAGGGACGCCUUAC | GUUUUUGUACUCUCAAG | 17 | 109 | 36 |
| thermophilius | | ACAGUUACUUAAAUCUU | AUUUAAGUAACUGUACA | | | |
| LMD-9 | | GCAGAAGCUACAAAGAU | AC | | | |
| | | AAGGCUUCAUGCCGAAA | (SEQ ID NO: 2797) | | | |
| | | UCAACACCCUGUCAUUU | | | | |
| | | UAUGGCAGGGUGUUUUC | | | | |
| | | GUUAUUU | | | | |
| | | (SEQ ID NO: 2729) | | | | |
| Enterococcus | 33 | UGUAGUCGACGGACUAC | GUUUUUGUACUCUCAAU | 3 | 130 | 36 |
| faecalis | | CGUGUUUGACGAAACAC | AAUUUCUUAUCAGUAAA | | | |
| TX0012 | | GUCUUUAAUAAUUUUAC | AC | | | |
| | | UGAUAAGAAAUUAUUGA | (SEQ ID NO: 2798) | | | |
| | | GAAUCUACAAAAAUAAG | | | | |
| | | GCAUCUUGCCGAAUUUA | | | | |
| | | CCGCCCUACAUAUGUAG | | | | |
| | | GGCGGUUUUUU | | | | |
| | | (SEQ ID NO: 2730) | | | | |
| Eubacterium | 34 | UGUAGAGAAAAUUUUAU | AUUUUAGUAACUGAAUA | 45 | 95 | 36 |
| rectale | | AGUCACGUAAAUUUUUC | AUUUACGUGACUGUAAA | | | |
| ATCC 33656 | | AGAUCUACUAAAACAAG | AC | | | |
| | | GCUUUAUGCCGAAAUCA | (SEQ ID NO: 2799) | | | |
| | | GGAGCACCGACGGGUGC | | | | |
| | | UCCUUUUUUU | | | | |
| | | (SEQ ID NO: 2731) | | | | |
| Mycoplama | 35 | UGUAUUUCGAAAUACAG | GUUUUGGUGUAGUAUCA | 64 | 110 | 36 |
| mobile | | AUGUACAGUUAAGAAUA | UUCUUAUGUAUUCUUAA | | | |
| 163K | | CAUAAGAAUGAUACAUC | AC | | | |
| | | ACUAAAAAAAGGCUUUA | (SEQ ID NO: 2800) | | | |
| | | UGCCGUAACUACUACUU | | | | |
| | | AUUUUCAAAAUAAGUAG | | | | |
| | | UUUUUUUU | | | | |
| | | (SEQ ID NO: 2732) | | | | |
| Mycoplasma | 36 | CUAGUAAGAAAUUGUCG | GUUUUUGUGCUGUACAA | >14 | 72 | 36 |
| ovipneumoniae | | CACAAAAAUAAGACGCA | UUUCUUACUAGAGUAAA | | | |
| SC01 | | UUAUGCUGUCGAAUUUC | AC | | | |
| | | CCCACCUAGUGGGGUUU | (SEQ ID NO: 2801) | | | |
| | | UUUU | | | | |
| | | (SEQ ID NO: 2733) | | | | |
| Mycoplasma | 37 | AUUAUUGCUUACACAAU | GUUUUAGCACUGUACAA | 40 | 92 | 36 |
| gallisepticum | | UAUUGUCGUGCUAAAAU | UACUUGUGUAAGCAAUA | | | |
| str. F | | AAGGCGCUGUUAAUGCA | AC | | | |
| | | GCUGCCGCAUCCGCCAG | (SEQ ID NO: 2802) | | | |
| | | AGCAUUUAUGCUCUGGC | | | | |
| | | UUUUUUU | | | | |
| | | (SEQ ID NO: 2734) | | | | |
| Mycoplasma | 38 | UAUAUAUUACUUACUUA | GUUUUGGGGUUGUACAA | 12 | 115 | 36 |
| synoviae | | ACAAAAUAAUUGUACGA | UUAUUUUGUUAAGUAAA | | | |
| 53 | | UUCCAAAAUAAGGCGCU | AC | | | |
| | | UAUGUAAGAUGCAAUAA | (SEQ ID NO: 2803) | | | |
| | | UGCACUUAUAUAAGCUG | | | | |
| | | CCGUAAACGCCGAGGUA | | | | |
| | | ACUCGGUUUUUUU | | | | |
| | | (SEQ ID NO: 2735) | | | | |
| Mycoplasma | 39 | AGUACAAAUUAAUUAUU | GUUUUAGUGUUGUACAA | 11 | 98 | 36 |
| canis | | GUUUACCCAAAUAUUGU | UAUUUGGGUAAACAAUA | | | |
| PG 14 | | ACAUCCUAAAUCAAGGC | AC | | | |
| | | GCUUAAUUGCUGCCGUA | (SEQ ID NO: 2804) | | | |
| | | AUUGCUGAAAGCGUAGC | | | | |
| | | UUUCAGUUUUUUU | | | | |
| | | (SEQ ID NO: 2736) | | | | |
| Walinella | 40 | CGUCGUCGCUGCGCGAA | GUUAUAGCCGCCUACUC | 10 | 92 | 36 |
| succiogenes | | AUGGCUGAGUAGGCAGC | AGCCAUUCCUCGCUAUA | | | |
| DSM 1740 | | GGCUAUAAUAAGGGGUG | AU | | | |
| | | UGGAGGCAUCCUGCGAA | (SEQ ID NO: 2805) | | | |
| | | GUUCUACUCUACGGAGU | | | | |
| | | AUCUUCU | | | | |
| | | (SEQ ID NO: 2737) | | | | |
| Campylobacter | 41 | AAGAAAUUUAAAAAGGG | GUUUUAGUCCCUUUUUA | 5 | 73 | 36 |
| jejuni | | ACUAAAAUAAAGAGUUU | AAUUUCUUUAUGGUAAA | | | |
| subsp. | | GCGGGACUCUGCGGGGU | AU | | | |
| jejuni | | UACAAUCCCCUAAAACC | (SEQ ID NO: 2806) | | | |
| NCTC 1168 | | GCUUU | | | | |
| | | (SEQ ID NO: 2738) | | | | |
| Heliobacter | 42 | none | GUUUUAGCCACUUCAUA | 11 | — | 36 |
| mustelae | | | AAUAUGUUUAUGCUAAA | | | |
| 12198 | | | AU | | | |
| | | | (SEQ ID NO: 2807) | | | |
| Methylosinus | 43 | UAUGGGAAAUCGGAAGG | GCCGUGGCUUCCCUGCC | 24 | 96 | 36 |
| trichosporium | | GAAGCCACGGCAAGGUG | GAUUUCCCUGUGGUAGG | | | |
| OB3b | | GUUUCAUAGAAAUCACU | CU | | | |
| | | GAAGGAUUACCCUCGUC | (SEQ ID NO: 2808) | | | |
| | | ACAGAAAUGUGGCGGGG | | | | |
| | | GGAUUCCUAUU | | | | |
| | | (SEQ ID NO: 2739) | | | | |
| Ilyobacter | 44 | none | GUUGUACUUCCCUAAUU | 23 | — | 36 |
| polytopus | | | AUUUUAGCUAUGUUACA | | | |
| DSM 2926 | | | AU | | | |
| | | | (SEQ ID NO: 2809) | | | |
| Bacillus | 45 | UAAGAUCAUAUCACAGC | GUCAUAGUUCCCCUAAG | 28 | 125 | 36 |
| smithii | | AAUGAUCUUAGGGUUAC | AUUAUUGCUGUGAUAUG | | | |
| 7_3_47FAA | | UAUGAUAAGGGCUUUCU | AU | | | |
| | | ACUUUAGGGGUAGAGAU | (SEQ ID NO: 2810) | | | |
| | | GUCCCGCGGCGUUGGGG | | | | |
| | | AUCGCCUAUUGCCCUUA | | | | |
| | | AAGGGCACUCCCCAUUU | | | | |
| | | UAAUUU | | | | |
| | | (SEQ ID NO: 2740) | | | | |
| Clostridum | 45 | UUAAUCAGGAACUAGGU | GUUAUAGUUCCUAGUAA | 27 | 107 | 36 |
| perfringens | | AUAGCAUAUCGAGAGUU | AUUCUCGAUAUGCUAUA | | | |
| D | | UAACUAGUUACUAUAAC | AU | | | |
| str.JGS1721 | | AAGGCAUUAAGCCGUAA | (SEQ ID NO: 2811) | | | |
| | | AGUAUCCCCUAUGUUCA | | | | |
| | | UUUGAACCUAGGGGUAU | | | | |
| | | CUUUU | | | | |
| | | (SEQ ID NO: 2741) | | | | |
| Clostridium | 46 | AUGGCAUAUCGGAGCCU | GUUAUAGCUCCAAUUCA | 9 | 100 | 36 |
| cellulolyticum | | GAAUUGUUGCUAUAAUA | GGCUCCGAUAUGCUAUA | | | |
| H10 | | AGGUGCUGGGUUUAGCC | AU | | | |
| | | CAGACCGCCAAGUUAAC | (SEQ ID NO: 2812) | | | |
| | | CCCGGCAUUUAUUGCUG | | | | |
| | | GGGUAUCUUGUUUUU | | | | |
| | | (SEQ ID NO: 2742) | | | | |
| Acidovorax | 47 | CGAUUGUGGUUAUCCGG | GUUGUAGCUCCCUCUCU | 15 | 103 | 36 |
| ebreus | | GGUGAGAGCCGUUGCUG | CACCCCGGAUAGCUACA | | | |
| TPSY | | CAAUAAGGAGGGGUCGC | CU | | | |
| | | AAGACCCCGUCCGUACC | (SEQ ID NO: 2813) | | | |
| | | CAAAAGCCUGGCAGGGA | | | | |
| | | AACCUGUCAGGCUUUUU | | | | |
| | | U | | | | |
| | | (SEQ ID NO: 2743) | | | | |
| Neisseria | 48 | ACAUAUUGUCGCACUGC | GUUGUAGCUCCCUUUCU | 17 | 111 | 36 |
| meningitides | | GAAAUGAGAACCGUUGC | CAUUUCGCAGUGCUACA | | | |
| Z2491 | | UACAAUAAGGCCGUCUG | AU | | | |
| | | AAAAGAUGUGCCGCAAC | (SEQ ID NO: 2814) | | | |
| | | GCUCUGCCCCUUAAAGC | | | | |
| | | UUCUGCUUUAAGGGGCA | | | | |
| | | UCGUUUAUU | | | | |
| | | (SEQ ID NO: 2744) | | | | |
| Pasteurella | 49 | GCAUAUUGUUGCACUGC | GUUGUAGUUCCCUCUCU | 6 | 110 | 36 |
| multocida | | GAAAUGAGAGACGUUGC | CAUUUCGCAGUGCUACA | | | |
| str. Pm70 | | UACAAUAAGGCUUCUGA | AU | | | |
| | | AAAGAAUGACCGUAACG | (SEQ ID NO: 2815) | | | |
| | | CUCUGCCCCUUGUGAUU | | | | |
| | | CUUAAUUGCAAGGGGCA | | | | |
| | | UCGUUUUU | | | | |
| | | (SEQ ID NO: 2745) | | | | |
| Aminomonas | 50 | none | GUCAUAGCUCCCUGCCG | 7 | — | 36 |
| paucivorans | | | CACUCCGAAAUGCUAUG | | | |
| DSM 12260 | | | CU | | | |
| | | | (SEQ ID NO: 2816) | | | |
| Roseburia | 52 | CUAAGAGAAUUAUAUCA | GUUGUAAUUCCCUGUUA | 62 | 99 | 36 |
| intestinalis | | UACCAAGUGAUAAUUAG | UCACUUGGUAUGGUAUA | | | |
| L1-82 | | GUUAUUACAAUAAGGUA | AU | | | |
| | | AGAAACCUAAAAGCUCU | (SEQ ID NO: 2817) | | | |
| | | AAUCCCAUUCUUCGGAA | | | | |
| | | UGGGAUUAUCUUUU | | | | |
| | | (SEQ ID NO: 2746) | | | | |
| Lactobacillus | 51 | No contig | | — | — | — |
| corniformis | | information | | | | |
| subsp. | | | | | | |
| Torquens | | | | | | |
| KCTC 3535 | | | | | | |
| Alicyclobacillus | 53 | GCGAGGGAUAUCAUACC | GUCAUAGUUCCCUCACA | 54 | 105 | 36 |
| hesperidum | | ACAUCAAGGCUUGCGAG | AGCCUCGAUGUGGUAUG | | | |
| URH17-3-68 | | GUUGCUAUGAUAAGGCA | AU | | | |
| | | ACAGGCCGCAAAGCACU | (SEQ ID NO: 2818) | | | |
| | | GACCCGCAUUCCAAUGA | | | | |
| | | AUGCGGGUCAUCUACUU | | | | |
| | | UUU | | | | |
| | | (SEQ ID NO: 2747) | | | | |
| Roseburia | 52 | None | | — | — | — |
| inulinivorans | | | | | | |
| DSM 16841 | | | | | | |
| Uncult.delta | 54 | none | GUCCUAGUUUCCCUUCC | 8 | — | 36 |
| proteobact. | | | AAUCAAAGCCUGCUACA | | | |
| HF0070_07E19 | | | CU | | | |
| | | | (SEQ ID NO: 2819) | | | |
| Caenispirillum | 58 | AUCACAGGGUGCCAUUA | GUCCUGUAGCCCGGUCC | 11 | — | 36 |
| salinarum | | CCAGAGAUGGUAGCACG | GUUCCACCGUGCUAGCU | | | |
| AK4 | | GUGGAACGGACCGGCAC | UC | | | |
| | | CUACAGGACAAGUGAUC | (SEQ ID NO: 2820) | | | |
| | | AUACACGUGACAGCCGC | | | | |
| | | CUCCCCCGCCCCAGUGG | | | | |
| | | CCAAGGGGAGGCGGCUU | | | | |
| | | UUCU | | | | |
| | | (SEQ ID NO: 2748) | | | | |
| Ruminococcus | 55 | Too short contig | | — | — | — |
| albus 8 | | | | | | |
| Trepanema | 56 | Too short contig | | — | — | — |
| sp. JC4 | | | | | | |
| Alcanivorax | 57 | none | | — | — | — |
| sp. W11-5 | | | | | | |
| Rhodospirillum | 59 | none | GUUCCAUGGCCCCGUCC | 8 | — | 36 |
| rubrum | | | CACACCGCCAUGGUAGA | | | |
| ATCC 11170 | | | GU | | | |
| | | | (SEQ ID NO: 2821) | | | |
| Ralstonia | 60 | GACUUUCCAGCAGAUCG | GUUGUAGCCAGAGCGCA | 35 | 105 | 36 |
| syzygii | | GGAAUUGCGCUUUGCUA | AUUCCCGAUCUGCUAAC | | | |
| R24 | | CUAACAAGCUGAAUCCG | CU | | | |
| | | UUAGGAGUAAAUGCACC | (SEQ ID NO: 2822) | | | |
| | | AAAUGAGAGGGCCGGCU | | | | |
| | | UUUGCCGGCCCUUUGCU | | | | |
| | | UUU | | | | |
| | | (SEQ ID NO: 2749) | | | | |
| Rhodovulum | 61 | CGUCUAGCAAGGAACGC | GUUGCGGUUGGGCCGCG | 12 | 87 | 36 |
| sp. PH10 | | GGCGUGGCCUCUCCGUU | CCGCGUUCCCUGCUAGA | | | |
| | | AACAAGGCACAUGCCAC | CC | | | |
| | | CAGAUCGAGGCGGGCUC | (SEQ ID NO: 2823) | | | |
| | | CGGUCCGCCUCUUUGCU | | | | |
| | | UU | | | | |
| | | (SEQ ID NO: 2750) | | | | |
| Alicycliphilus | 62 | CACUCAGUUCACUGGGA | GUUCCGGCCAGUGCGCA | 75 | 90 | 36 |
| dentrificans | | UAUGCGCUCUGACCGCU | UAUCCCAGUGAUCUAGA | | | |
| K601 | | AACAAGCUGAAAGAUGC | AU | | | |
| | | ACCAAAUGGAAAGCCCC | (SEQ ID NO: 2824) | | | |
| | | GCAUGCGGGGCUUUCGU | | | | |
| | | CUUUU | | | | |
| | | (SEQ ID NO: 2751) | | | | |
| Cand. | 63 | GCCAUUAAUAAUUGAUU | GUUGCUCUAGGCUCUCA | 27 | 109 | 36 |
| Puniceispirillum | | GCAAUAACACUCUGGUG | AUCACCAGAGUGCUAUA | | | |
| marinum | | AUUGAGGAGCCUAUGGU | CU | | | |
| IMCC1322 | | UAACAAGUGGGUUUCCU | (SEQ ID NO: 2825) | | | |
| | | GCACAAAUCUAAGAGCU | | | | |
| | | GCCUCCGGGCGGCUCUU | | | | |
| | | UUGCUUU | | | | |
| | | (SEQ ID NO: 2752) | | | | |
| Azospirillum | 64 | UGGAAAUUCGAUGGGGA | GUUGCGGCUGGACCCCC | 25 | 93 | 36 |
| sp. B510 | | UCGGGGGUCCAGCCGUU | GAUCCCCAUCGGCUACA | | | |
| | | AACAUGUUCCCUUCGGG | CU | | | |
| | | GAGCACGAAAUGCGGGG | (SEQ ID NO: 2826) | | | |
| | | CGGGCCACGGUCCGCCC | | | | |
| | | CUUUUUUU | | | | |
| | | (SEQ ID NO: 2753) | | | | |
| Dinoroseobacter | | GUUCAGAAUUCGCGGUC | GUUGCGGCUGGACCCCG | 19 | | 36 |
| shibae | | GAGCCGUUAACAAGCUC | AAUUCUGAACAGCUAAA | | | |
| DFL 12 | | GAAGAAGCACCACAUUA | CU | | | |
| | | AAACGCGUCCUGCGGGG | (SEQ ID NO: 2827) | | | |
| | | CGCGUUUUCUUUUUU | | | | |
| | | (SEQ ID NO: 2754) | | | | |
| Nitrobacter | 65 | None | | — | — | — |
| hamburgensis | | | | | | |
| X14 | | | | | | |
| Bradyrhizobium | 66 | none | | — | — | — |
| sp. | | | | | | |
| BTAil | | | | | | |
| Parvibaculm | 68 | UAGCAAAUCGAGAGGCG | GCUGCGGAUUGCGGCCG | 49 | 125 | 36 |
| lavamentivorans | | GUCGCUUUUCGCAAGCA | UCUCUCGAUUUGCUACU | | | |
| DS-1 | | AAUUGACCCCUUGUGCG | CU | | | |
| | | GGCUCGGCAUCCCAAGG | (SEQ ID NO: 2828) | | | |
| | | UCAGCUGCCGGUUAUUA | | | | |
| | | UCGAAAAGGCCCACCGC | | | | |
| | | AAGCAGCGCGUGGGCCU | | | | |
| | | UUUUUU | | | | |
| | | (SEQ ID NO: 2755) | | | | |
| Bacteroides | 70 | none | GUUGUGAUUUGUUUUUA | 10 | — | 47 |
| sp. 20_3 | | | AAUUAGUAUCUUUGAUC | | | |
| | | | CAUUGGAAACAGC | | | |
| | | | (SEQ ID NO: 2829) | | | |
| Bergeyella | 69 | Too short contig | | — | — | — |
| zoohelcum | | | | | | |
| ATCC 43767 | | | | | | |
| Ignavibacterium | 71 | UUCUGUCCCAUUUGUUG | GUUGGUUUAAUAUCCUA | 9 | 107 | 45 |
| album | | UGAUUUGCUUUUGCACA | AAGAACAAGUUGAAAGC | | | |
| JCM 16511 | | GCAUCCUUUGGACAACU | AAAUCACAAC | | | |
| | | UGUUCUUUGAGGAUAUU | (SEQ ID NO: 2830) | | | |
| | | AAAACCAACCUAUCUGU | | | | |
| | | UUAAGAUAGUCAAUAUC | | | | |
| | | UUUUU | | | | |
| | | (SEQ ID NO: 2756) | | | | |
| Bacteroides | 72 | none | GUUGUGAUUUGCUUUCA | 28 | 4 | 48 |
| fragilis | | | AAUUAGUAUCUUUGAAC | | | |
| NCTC 9343 | | | CAUUGGAAACAGCG | | | |
| | | | (SEQ ID NO: 2831) | | | |
| Barnesiella | 74 | UUAAUGUGUAAAUAUAA | GUUGUGAUUCGCUUUCA | >2 | 158 | 47 |
| interinhominis | | AAAAAUUUAUCGAAAAA | AAUUUGUAUCUUUGACA | | | |
| YIT 11860 | | UACAAUAGUAUUAAAAA | UAUUAAAUACAGC | | | |
| | | AUUAUAUGUAUAUUUGU | (SEQ ID NO: 2832) | | | |
| | | CAACACAAAUUUGAAAG | | | | |
| | | CAAAUCACAAUAAGGAU | | | | |
| | | UAUUCCGUUGUGAAAAC | | | | |
| | | AUUUGGAAGGGGGAGUA | | | | |
| | | UUUAUACUCCUCGUUCU | | | | |
| | | UUUUU | | | | |
| | | (SEQ ID NO: 2757) | | | | |
| Porphyromonas | 73 | none | | — | — | — |
| as sp. Oral | | | | | | |
| taxon 279 | | | | | | |
| str. F0450 | | | | | | |
| Odoribacter | 75 | CGUUGAUUAAACAAAUC | GCUGUGAUUUGAUGUAA | >3 | 94 | 36 |
| laneus | | AAUUUUUACAUCUUAUC | AUACUUGAUAAGAUAUA | | | |
| YIT 12061 | | ACAGCAAGGCUAUAUGC | CC | | | |
| | | CGAAGGAUGUAAUCCUA | (SEQ ID NO: 2833) | | | |
| | | UACUCCCGCUUCGGUGG | | | | |
| | | GAGUUUUUU | | | | |
| | | (SEQ ID NO: 2758) | | | | |
| Flavobacterium | 76 | AUGUUUUAUAUAUUUGC | GUUGUGGUUUGAUUAAA | 29 | 112 | 36 |
| branchiophilim | | AGCAUGAUUAAUAUUUC | GAUUAGAAAACACGAUA | | | |
| FL-15 | | UAAUCUUUAAUCUUAUC | UG | | | |
| | | ACAAUAAGGCUAUAUGC | (SEQ ID NO: 2834) | | | |
| | | CGUAGAUGAAAAUCUUU | | | | |
| | | AGUCCUGCUUCGGUGGG | | | | |
| | | ACUUUUUUUU | | | | |
| | | (SEQ ID NO: 2759) | | | | |
| Prevotella | 77 | GUUUGUUUUAUCAGAAA | GUUGUACGUGCUAAUGC | >3 | 121 | 48 |
| sp. C561 | | UAAGUUGUAUAUUUGCA | AAAGAUACACAUUUUGA | | | |
| | | CUCAGAUACACAGUGAA | AGCAAAUCACAAC | | | |
| | | GACUUUUCACAACAAGG | | | | |
| | | CUAUAAGCCGAAGAUUU | (SEQ ID NO: 2835) | | | |
| | | UCUUGUACCCUGCGGUC | | | | |
| | | AACCACAGGGUCUUUUU | | | | |
| | | UU | | | | |
| | | (SEQ ID NO: 2760) | | | | |
| Prevotella | 78 | None | GUUGUGGUUUGAUGUAG | >3 | — | 36 |
| timonensis | | | AAUCAAAAUAUGAAGCA | | | |
| CRIS 5C-B1 | | | AC | | | |
| | | | (SEQ ID NO: 2836) | | | |
| Elusimicrobium | 79 | none | GUUAGGGUUGCCCUCCG | 15 | — | 36 |
| minutum | | | AGAAUUGAUUUUAUAGA | | | |
| Pei191 | | | AU | | | |
| | | | (SEQ ID NO: 2837) | | | |
| Sphaerochaeta | 80 | GUUAUAUCUUAACAAAA | GUUGGGGAUGACCGCUG | 43 | 80 | 36 |
| globus | | ACCAGCGAUUAUCUCUA | AUUUUUGUUAAGAUUGA | | | |
| str. Buddy | | AUAAGACUUAAGUCGCA | CC | | | |
| | | AAAUGCUCCCUAUUUUG | (SEQ ID NO: 2838) | | | |
| | | GGAGCUUUUUUU | | | | |
| | | (SEQ ID NO: 2761) | | | | |
| Acidothermus | 81 | GAGACAGGCUACCUAGC | GCUGGGGAGCCUGUCUC | 24 | 75 | 36 |
| cellulyticus | | AAGACCCCUUCGUGGGG | AAUCCCCCGGCUAAAAU | | | |
| 11B | | UCGCAUUCUUCACCCCC | GG | | | |
| | | UCGCAGCAGCGAGGGGG | (SEQ ID NO: 2839) | | | |
| | | UUCGUUU | | | | |
| | | (SEQ ID NO: 2762) | | | | |
| Actinomyces | 82 | None | GCUGGGAAUCAAUCACC | 21 | — | 36 |
| sp. Oral | | | ACUCCCCUUUGAUAUAC | | | |
| taxon 180 | | | UG | | | |
| str. F0310 | | | (SEQ ID NO: 2840) | | | |
| Bifidobacterium | 84 | none | GCUGGGAAUUAGCAUUC | 43 | — | 36 |
| longum | | | ACCCUUCUUGAUAAGCU | | | |
| DJO10A | | | UG | | | |
| | | | (SEQ ID NO: 2841) | | | |
| Akkermansia | 85 | ACAAAACAUCUGAACAU | GUUUUGCCUUGAAUCCA | 12 | 109 | 36 |
| mciniphila | | CACUUUAACUCCCAACG | AAAUAAGGCACAGUACA | | | |
| ATCC BAA- | | GAUUCAAGACAAAAUUU | AC | | | |
| 835 | | GAAAUGCAAACCGAUUU | (SEQ ID NO: 2842) | | | |
| | | UCCUGACUGCCAGCCAG | | | | |
| | | UCACACCGGUAACAAAA | | | | |
| | | GCAUUUU | | | | |
| | | (SEQ ID NO: 2763) | | | | |
| Nitratifractor | 86 | GUUGUAACAGGGUAGGG | GUUUUAAGACCCCUCAA | 12 | 100 | 36 |
| salsuginis | | UUUUUUGAGGGGUCUUA | AACCCCACCCUGUUACA | | | |
| DSM 16511 | | AAAUCAAGAACUGUUAC | AU | | | |
| | | AACAGUUCCAUUCUAGG | (SEQ ID NO: 2843) | | | |
| | | GCCCAUCUUCGGACGGG | | | | |
| | | CCUCAGCCUUUUUUU | | | | |
| | | (SEQ ID NO: 2764) | | | | |

^{a}The position of the strain of the Cas9 tree is given. Color shading corresponds to the color branch
of the tree.
^{b}Predicted or previously validated tracrRNA sequence is given, none, no tracrRNA was found; too short
contig, the type II CRISPR-Cas locus is at the end of the genomic sequence contig and it was not
possible to identify a tracrRNA ortholog; no contig information, genomic sequence contig encoding a
type II CRISPR-Cas locus was not available.
^{c}Predicted or previously validated CRISPR repeat sequence is given, none, no repeat-spacer array was
found; too short contig, the type II CRISPR-Cas locus is at the end of the genomic sequence contig and
it was not possible to identify a repeat-spacer array; no contig information, genomic sequence contig
encoding a type II CIRSPR-Cas locus was not available.
^{d}Amount of the CRISPR repeats of the repeat-spacer array is given. Values preceded by “>” indicate a
minimal amount of repeats in the array given that the array is at the end of the genomic sequence contig.
^{e}The length of the CRISPR repeats is given. Values are higher than the typical 36 nt are highlighted.

SUPPLEMENTAL TABLE S6

| Strain | Cas9 GI | Cluster |
|---|---|---|
| Acidaminococcus intestini RyC-MR95 | 352684361 | 1 |
| Acidaminococcus sp. D21 | 227824983 | 1 |
| Anaerococcus tetradius ATCC 35098 | 227501312 | 1 |
| Bifidobacterium bifidum S17 | 310286728 | 1 |
| Catenibacterium mitsuokai DSM 15897 | 224543312 | 1 |
| Coprococcus catus GD/7 | 291520705 | 1 |
| Coriobacterium glomerans PW2 | 328956315 | 1 |
| Dolosigranulum pigrum ATCC 51524 | 375088882 | 1 |
| Dorea langicatena DSM 13814 | 153855454 | 1 |
| Eggerthella sp. YY7918 | 339445983 | 1 |
| Enterococcus faecalis ATCC 29200 | 229548613 | 1 |
| Enterococcus faecalis ATCC 4200 | 256617555 | 1 |
| Enterococcus faecalis D6 | 257086028 | 1 |
| Enterococcus faecalis E1Sol | 257080914 | 1 |
| Enterococcus faecalis OG1RF | 384512368 | 1 |
| Enterococcus faecalis TX0470 | 312900261 | 1 |
| Enterococcus faecalis TX4244 | 422695652 | 1 |
| Enterococcus faecium 1,141,733 | 257888853 | 1 |
| Enterococcus faecium 1,231,408 | 257893735 | 1 |
| Enterococcus faecium E1133 | 430847551 | 1 |
| Enterococcus faecium E3083 | 431757680 | 1 |
| Enterococcus faecium PC4.1 | 293379700 | 1 |
| Enterococcus faecium TX1330 | 227550972 | 1 |
| Enterococcus faecium TX1337RF | 424765774 | 1 |
| Enterococcus hirae ATCC 9790 | 392988474 | 1 |
| Enterococcus italicus DSM 15952 | 315641599 | 1 |
| Eubacterium sp. AS15 | 402309258 | 1 |
| Eubacterium yurii subsp. margaretiae ATCC 43715 | 306821691 | 1 |
| Filifactor alocis ATCC 35896 | 374307738 | 1 |
| Finegoldia magna ACS-171-V-Col3 | 302380288 | 1 |
| Finegoldia magna ATCC 29328 | 169823755 | 1 |
| Finegoldia magna SY403409CC001050417 | 417926052 | 1 |
| Fructobacillus fructosus KCTC 3544 | 339625081 | 1 |
| Fusobacterium nucleatum subsp. vincentii ATCC 49256 | 34762592 | 1 |
| Fusobacterium sp. 1_1_41FAA | 294782278 | 1 |
| Fusobacterium sp. 3_1_27 | 294785695 | 1 |
| Fusobacterium sp. 3_1_36A2 | 256845019 | 1 |
| Gemella haemolysans ATCC 10379 | 241889924 | 1 |
| Gemella morbillorum M424 | 317495358 | 1 |
| Gordonibacter pamelaeae 7-10-1-b | 295106015 | 1 |
| Helcococcus kunzii ATCC 51366 | 375092427 | 1 |
| Lactobacillus animalis KCTC 3501 | 335357451 | 1 |
| Lactobacillus brevis subsp. gravesensis ATCC 27305 | 227509761 | 1 |
| Lactobacillus buchneri CD034 | 406027703 | 1 |
| Lactobacillus buchneri NRRL B-30929 | 331702228 | 1 |
| Lactobacillus casei BL23 | 191639137 | 1 |
| Lactobacillus casei Lc-10 | 418010298 | 1 |
| Lactobacillus casei M36 | 417996992 | 1 |
| Lactobacillus casei str. Zhang | 301067199 | 1 |
| Lactobacillus casei 771499 | 417999832 | 1 |
| Lactobacillus casei UCD174 | 418002962 | 1 |
| Lactobacillus casei W56 | 409997999 | 1 |
| Lactobacillus coryniformis subsp. coryniformis KCTC 3167 | 333394446 | 1 |
| Lactobacillus curvatus CRL 705 | 354808135 | 1 |
| Lactobacillus farciminis KCTC 3681 | 336394882 | 1 |
| Lactobacillus fermentum 28-3-CHN | 260662220 | 1 |
| Lactobacillus fermentum ATCC 14931 | 227514633 | 1 |
| Lactobacillus florum 2F | 408790128 | 1 |
| Lactobacillus gasseri JV-V03 | 300361537 | 1 |
| Lactobacillus hominis CRBIP 24.179 | 395244248 | 1 |
| Lactobacillus iners LactinV 11V1-d | 309803917 | 1 |
| Lactobacillus jensenii 269-3 | 238854567 | 1 |
| Lactobacillus jensenii 27-2-CHN | 256852176 | 1 |
| Lactobacillus johnsonii DPC 6026 | 385826041 | 1 |
| Lactobacillus mucosae LM1 | 377831443 | 1 |
| Lactobacillus paracasei subsp. paracasei 8700:2 | 239630053 | 1 |
| Lactobacillus pentosus IG1 | 339637353 | 1 |
| Lactobacillus pentosus KCA1 | 392947436 | 1 |
| Lactobacillus pentosus MP-10 | 334881121 | 1 |
| Lactobacillus plantarum ZJ316 | 448819853 | 1 |
| Lactobacillus rhamnosus GG | 258509199 | 1 |
| Lactobacillus rhamnosus HN001 | 199597394 | 1 |
| Lactobacillus rhamnosus R0011 | 418072660 | 1 |
| Lactobacillus ruminis ATCC 25644 | 323340068 | 1 |
| Lactobacillus salivarius SMXD51 | 418960525 | 1 |
| Lactobacillus sanfranciscensis TMW 1.1304 | 347534532 | 1 |
| Lactobacillus sp. 66c | 408410332 | 1 |
| Lactobacillus versmoldensis KCTC 3814 | 365906066 | 1 |
| Leuconostoc gelidum KCTC 3527 | 333398273 | 1 |
| Listeria innocua ATCC 33091 | 423101383 | 1 |
| Listeria innocua Clip11262 | 16801805 | 1 |
| Listeria innocua FSL S4-378 | 422414122 | 1 |
| Listeria ivanovii FSL F6-596 | 315305353 | 1 |
| Listeria monocytagenes 104035 | 386044902 | 1 |
| Listeria monocytogenes FSL J1-175 | 255520581 | 1 |
| Listeria monocytogenes FSL J1-194 | 254825045 | 1 |
| Listeria monocytagenes FSL J1-208 | 422810631 | 1 |
| Listeria monocytogenes FSL N3-165 | 254829042 | 1 |
| Listeria monocytogenes FSL R2-503 | 254854201 | 1 |
| Listeria monocytogenes str. 1/2a F6854 | 47097148 | 1 |
| Megasphaera sp. UPII 135-E | 342218215 | 1 |
| Oenococcus kitaharae DSM 17330 | 366983953 | 1 |
| Oenococcus kitaharae DSM 17330 | 372325145 | 1 |
| Olsenella uli DSM 7084 | 302336020 | 1 |
| Pediococcus acidilactici DSM 20284 | 304386254 | 1 |
| Pediococcus acidilactici MA18/5M | 418068659 | 1 |
| Peptoniphilus duerdenii ATCC BAA-1640 | 304438954 | 1 |
| Planococcus antarcticus DSM 14505 | 389815359 | 1 |
| Psychrollexus torquis ATCC 700755 | 408489713 | 1 |
| Ruminococcus lactaris ATCC 29176 | 197301447 | 1 |
| Scardovia wiggsiae F0424 | 423349694 | 1 |
| Solobacterium moorei F0204 | 320528778 | 1 |
| Staphylococcus pseudintermedius ED99 | 323463801 | 1 |
| Staphylococcus pseudintermedius ED99 | 386318630 | 1 |
| Staphylococcus simulans ACS-120-V-Sch1 | 414160476 | 1 |
| Streptococcus agalactiae 2603V/R | 22537057 | 1 |
| Streptococcus agalactiae 515 | 77413160 | 1 |
| Streptococcus agalactiae A909 | 76788458 | 1 |
| Streptococcus agalactiae ATCC 13813 | 339301617 | 1 |
| Streptococcus agalactiae CJB111 | 77411010 | 1 |
| Streptococcus agalactiae COH1 | 77407964 | 1 |
| Streptococcus agalactiae FSL S3-026 | 417005168 | 1 |
| Streptococcus agalactiae GB00112 | 421147428 | 1 |
| Streptococcus agalactiae H368 | 77405721 | 1 |
| Streptococcus agalactiae NEM316 | 25010965 | 1 |
| Streptococcus agalactiae SA20-06 | 410594450 | 1 |
| Streptococcus agalactiae STIR-CD-17 | 421532069 | 1 |
| Streptococcus anginosus F0211 | 315223162 | 1 |
| Streptococcus anginosus SK1138 | 421490579 | 1 |
| Streptococcus anginosus SK52 = DSM 20563 | 335031483 | 1 |
| Streptococcus bovis ATCC 700338 | 306833855 | 1 |
| Streptococcus canis FSL Z3-227 | 392329410 | 1 |
| Streptococcus constellatus subsp. constellatus SK53 | 418965022 | 1 |
| Streptococcus dysgalactiae subsp. equisimilis AC-2713 | 410494913 | 1 |
| Streptococcus dysgalactiae subsp. equisimilis ATCC 12394 | 386317166 | 1 |
| Streptococcus dysgalactiae subsp. equisimilis GGS_124 | 251782637 | 1 |
| Streptococcus dysgalactiae subsp. equisimilis RE378 | 408401787 | 1 |
| Streptococcus equi subsp. zooepidemicus MGCS10565 | 195978435 | 1 |
| Streptococcus equinus ATCC 9812 | 320547102 | 1 |
| Streptococcus gallolyticus subsp. gallolyticus ATCC BAA-2069 | 325978669 | 1 |
| Streptococcus gallolyticus subsp. gallolyticus TX20005 | 306831733 | 1 |
| Streptococcus gallolyticus UCN34 | 288905639 | 1 |
| Streptococcus infantarius subsp. infantarius CJ18 | 379705580 | 1 |
| Streptococcus iniae 9117 | 406658208 | 1 |
| Streptococcus macacae NCTC 11558 | 357636406 | 1 |
| Streptococcus mitis SK321 | 307710946 | 1 |
| Streptococcus mutans 11SSST2 | 449165720 | 1 |
| Streptococcus mutans 11SSST2 | 449951835 | 1 |
| Streptococcus mutans 11VS1 | 449976542 | 1 |
| Streptococcus mutans 14D | 450149988 | 1 |
| Streptococcus mutans 15VF2 | 449170557 | 1 |
| Streptococcus mutans 15VF2 | 449965974 | 1 |
| Streptococcus mutans 1SM1 | 449158457 | 1 |
| Streptococcus mutans 1SM1 | 449920643 | 1 |
| Streptococcus mutans 24 | 449247589 | 1 |
| Streptococcus mutans 24 | 450180942 | 1 |
| Streptococcus mutans 2VS1 | 449174812 | 1 |
| Streptococcus mutans 2VS1 | 449968746 | 1 |
| Streptococcus mutans 3SN1 | 449162653 | 1 |
| Streptococcus mutans 3SN1 | 449931425 | 1 |
| Streptococcus mutans 4SM1 | 449159838 | 1 |
| Streptococcus mutans 4SM1 | 449927152 | 1 |
| Streptococcus mutans 4VF1 | 449167132 | 1 |
| Streptococcus mutans 4VF1 | 449961027 | 1 |
| Streptococcus mutans 5SM3 | 449176693 | 1 |
| Streptococcus mutans 5SM3 | 449980571 | 1 |
| Streptococcus mutans 66-2A | 449240165 | 1 |
| Streptococcus mutans 66-2A | 450160342 | 1 |
| Streptococcus mutans 8ID3 | 449154769 | 1 |
| Streptococcus mutans 8ID3 | 449872064 | 1 |
| Streptococcus mutans A19 | 449187668 | 1 |
| Streptococcus mutans A19 | 450013175 | 1 |
| Streptococcus mutans B | 450166294 | 1 |
| Streptococcus mutans G123 | 450029806 | 1 |
| Streptococcus mutans GS-5 | 397650022 | 1 |
| Streptococcus mutans LJ23 | 387785882 | 1 |
| Streptococcus mutans M21 | 449194333 | 1 |
| Streptococcus mutans M21 | 450036249 | 1 |
| Streptococcus mutans M230 | 449260994 | 1 |
| Streptococcus mutans M230 | 449903532 | 1 |
| Streptococcus mutans M2A | 449209586 | 1 |
| Streptococcus mutans M2A | 450074072 | 1 |
| Streptococcus mutans N29 | 449182997 | 1 |
| Streptococcus mutans N29 | 450003067 | 1 |
| Streptococcus mutans N3209 | 449210660 | 1 |
| Streptococcus mutans N3209 | 450077860 | 1 |
| Streptococcus mutans N66 | 449212466 | 1 |
| Streptococcus mutans N66 | 450083993 | 1 |
| Streptococcus mutans NFSM1 | 449202104 | 1 |
| Streptococcus mutans NFSM1 | 450051112 | 1 |
| Streptococcus mutans NLML1 | 450140393 | 1 |
| Streptococcus mutans NLML4 | 449202681 | 1 |
| Streptococcus mutans NLML4 | 450059882 | 1 |
| Streptococcus mutans NLML9 | 449209148 | 1 |
| Streptococcus mutans NLML9 | 450066176 | 1 |
| Streptococcus mutans NMT4863 | 449186850 | 1 |
| Streptococcus mutans NMT4863 | 450007078 | 1 |
| Streptococcus mutans NN2025 | 290580220 | 1 |
| Streptococcus mutans NV1996 | 450086338 | 1 |
| Streptococcus mutans NVAB | 449181424 | 1 |
| Streptococcus mutans NVAB | 449990810 | 1 |
| Streptococcus mutans R221 | 449258042 | 1 |
| Streptococcus mutans R221 | 449899675 | 1 |
| Streptococcus mutans S1B | 449251227 | 1 |
| Streptococcus mutans S1B | 449877120 | 1 |
| Streptococcus mutans SF1 | 450098705 | 1 |
| Streptococcus mutans SF14 | 449221374 | 1 |
| Streptococcus mutans SF14 | 450107816 | 1 |
| Streptococcus mutans SM1 | 449245264 | 1 |
| Streptococcus mutans SM1 | 450176410 | 1 |
| Streptococcus mutans SM4 | 449246010 | 1 |
| Streptococcus mutans SM4 | 450170248 | 1 |
| Streptococcus mutans SM6 | 449223000 | 1 |
| Streptococcus mutans SM6 | 450112022 | 1 |
| Streptococcus mutans ST6 | 449227252 | 1 |
| Streptococcus mutans ST6 | 450123011 | 1 |
| Streptococcus mutans UA159 | 24379809 | 1 |
| Streptococcus mutans W6 | 450094364 | 1 |
| Streptococcus oralis SK304 | 421488030 | 1 |
| Streptococcus aralis SK610 | 419782534 | 1 |
| Streptococcus pseudoporcinus LQ 940-04 | 416852857 | 1 |
| Streptococcus pyogenes M1 | 13622193 | 1 |
| Streptococcus pyogenes MGAS10750 | 94543903 | 1 |
| Streptococcus pyogenes MGA515252 | 94994317 | 1 |
| Streptococcus pyogenes MGAS2096 | 383479946 | 1 |
| Streptococcus pyogenes MGAS315 | 94992340 | 1 |
| Streptococcus pyogenes MGAS5005 | 21910213 | 1 |
| Streptacoccus pyogenes MGAS6180 | 71910582 | 1 |
| Streptococcus pyogenes MGAS9429 | 71903413 | 1 |
| Streptococcus pyogenes NZ131 | 94988516 | 1 |
| Streptococcus pyogenes SSI-1 | 28896088 | 1 |
| Streptococcus ratti FA-1= DSM 20564 | 400290495 | 1 |
| Streptococcus salivarius K12 | 421452908 | 1 |
| Streptococcus sanguinis SK115 | 422848603 | 1 |
| Streptococcus sanguinis SK330 | 422860049 | 1 |
| Streptococcus sanguinis SK353 | 422821159 | 1 |
| Streptococcus sanguinis SK49 | 422884106 | 1 |
| Streptococcus sp. C300 | 322375978 | 1 |
| Streptococcus sp. F0441 | 414157437 | 1 |
| Streptococcus sp. M334 | 322378004 | 1 |
| Streptococcus sp. oral taxon 56 str. F0418 | 339640839 | 1 |
| Streptococcus sp. oral taxon 71 str. 73H25AP | 306826314 | 1 |
| Streptococcus suis ST1 | 389856936 | 1 |
| Streptococcus thermophilus | 343794781 | 1 |
| Streptococcus thermophilus LMD-9 | 116628213 | 1 |
| Streptococcus thermophilus MN-ZLW-002 | 387910220 | 1 |
| Streptococcus thermophilus ND03 | 386087120 | 1 |
| Treponema denticola AL-2 | 449103686 | 1 |
| Treponema denticola ASLM | 449106292 | 1 |
| Treponema denticola ATCC 35405 | 42525843 | 1 |
| Treponema denticola H1-T | 449118593 | 1 |
| Treponema denticola H-22 | 449117322 | 1 |
| Treponema denticola OTK | 449125136 | 1 |
| Treponema denticola SP37 | 449130155 | 1 |
| Veillonella atypica ACS-134-V-Col7a | 303229466 | 1 |
| Veillonella parvula ATCC 17745 | 282849530 | 1 |
| Veillonella sp. 6_1_27 | 294792465 | 1 |
| Veillonella sp. oral taxon 780 str. F0422 | 342213964 | 1 |
| Streptococcus pyogenes SF370 (M1 GAS) | 209559356 | 1 |
| Streptococcus pyogenes MGAS10270 | 56808315 | 1 |
| Acidovorax ebreus TPSY | 222109285 | 2 |
| Actinobacillus minor NM305 | 240949037 | 2 |
| Actinobacillus pleuropneumoniae serovar 10 str. D13039 | 307256472 | 2 |
| Actinobacillus succinogenes 130Z | 152978060 | 2 |
| Actinobacillus suis H91-0380 | 407692091 | 2 |
| Alicyclobacillus hesperidum URH17-3-68 | 403744858 | 2 |
| Aminomonas paucivorans DSM 12260 | 312879015 | 2 |
| Bacillus cereus BAG4X12-1 | 423439645 | 2 |
| Bacillus cereus BAG4X2-1 | 423445130 | 2 |
| Bacillus cereus Rock1-15 | 229113166 | 2 |
| Bacillus smithii 7_3_47FAA | 365156657 | 2 |
| Bacillus thuringiensis serovar finitimus YBT-020 | 384183447 | 2 |
| Bacteroides sp. 3_1_33FAA | 265750948 | 2 |
| Brevibacillus laterosporus GI-9 | 421874297 | 2 |
| Campylobacter coli 1098 | 419564797 | 2 |
| Campylobacter coli 111-3 | 419536531 | 2 |
| Campylobacter coli 132-6 | 419572019 | 2 |
| Campylobacter coli 151-9 | 419603415 | 2 |
| Campylobacter coli 1909 | 419576091 | 2 |
| Campylobacter coli 1957 | 419581876 | 2 |
| Campylobacter coli 2692 | 419553162 | 2 |
| Campylobacter coli 59-2 | 419578074 | 2 |
| Campylobacter coli 67-8 | 419587721 | 2 |
| Campylobacter coli 80352 | 419559505 | 2 |
| Campylobacter coli 80352 | 419558307 | 2 |
| Campylobacter jejuni subsp. doylei 269.97 | 153952471 | 2 |
| Campylobacter jejuni subsp. jejuni 110-21 | 419676124 | 2 |
| Campylobacter jejuni subsp. jejuni 129-258 | 419619138 | 2 |
| Campylobacter jejuni subsp. jejuni 1336 | 283956897 | 2 |
| Campylobacter jejuni subsp. jejuni 140-16 | 419681578 | 2 |
| Campylobacter jejuni subsp. jejuni 1577 | 419685099 | 2 |
| Campylobacter jejuni subsp. jejuni 1854 | 419689467 | 2 |
| Campylobacter jejuni subsp. jejuni 1997-10 | 419666522 | 2 |
| Campylobacter jejuni subsp. jejuni 2008-1025 | 419650041 | 2 |
| Campylobacter jejuni subsp. jejuni 2008-872 | 419654778 | 2 |
| Campylobacter jejuni subsp. jejuni 2008-979 | 419660762 | 2 |
| Campylobacter jejuni subsp. jejuni 2008-988 | 419655317 | 2 |
| Campylobacter jejuni subsp. jejuni 2008-988 | 419656328 | 2 |
| Campylobacter jejuni subsp. jejuni 260.94 | 86152042 | 2 |
| Campylobacter jejuni subsp. jejuni 414 | 283953849 | 2 |
| Campylobacter jejuni subsp. jejuni 51037 | 419674189 | 2 |
| Campylobacter jejuni subsp. jejuni 51494 | 419619463 | 2 |
| Campylobacter jejuni subsp. jejuni 53161 | 419647275 | 2 |
| Campylobacter jejuni subsp. jejuni 60004 | 419629136 | 2 |
| Campylobacter jejuni subsp. jejuni 81116 | 157415744 | 2 |
| Campylobacter jejuni subsp. jejuni 84-25 | 88596565 | 2 |
| Campylobacter jejuni subsp. jejuni 87459 | 419680124 | 2 |
| Campylobacter jejuni subsp. jejuni ATCC 33560 | 419643715 | 2 |
| Campylobacter jejuni subsp. jejuni CF93-6 | 86149266 | 2 |
| Campylobacter jejuni subsp. jejuni CG8486 | 148925683 | 2 |
| Campylobacter jejuni subsp. jejuni H893-13 | 86152450 | 2 |
| Campylabacter jejuni subsp. jejuni LMG 23210 | 419696801 | 2 |
| Campylobacter jejuni subsp. jejuni LMG 23211 | 419697443 | 2 |
| Campylobacter jejuni subsp. jejuni LMG 23263 | 419628620 | 2 |
| Campylobacter jejuni subsp. jejuni LMG 23264 | 419632476 | 2 |
| Campylobacter jejuni subsp. jejuni LMG 23269 | 419634246 | 2 |
| Campylobacter jejuni subsp. jejuni LMG 23357 | 419641132 | 2 |
| Compylobacter jejuni subsp. jejuni NCTC 11168 | 218563121 | 2 |
| Campylobacter jejuni subsp. jejuni NW | 424845990 | 2 |
| Campylobacter jejuni subsp. jejuni PT14 | 407942868 | 2 |
| Campylobacter lari | 345468028 | 2 |
| Clostridium cellulolyticum H10 | 220930482 | 2 |
| Clostridium perfringens C str. JGS1495 | 169343975 | 2 |
| Clostridium perfringens D str. JGS1721 | 182624245 | 2 |
| Haemophilus parainfluenzae ATCC 33392 | 325578067 | 2 |
| Haemophilus parainfluenzae CCUG 13788 | 359298684 | 2 |
| Haemophilus parainfluenzae T3T1 | 345430422 | 2 |
| Haemophilus sputorum HK 2154 | 402304649 | 2 |
| Helicobacter canadensis MIT 98-5491 | 253828136 | 2 |
| Helicobacter cinaedi ATCC BAA-847 | 396079277 | 2 |
| Helicobacter cinaedi CCUG 18818 | 313144862 | 2 |
| Helicobacter cinaedi PAGU611 | 386762035 | 2 |
| Helicobacter mustelae 12198 | 291276265 | 2 |
| Ilyobacter polytropus DSM 2926 | 310780384 | 2 |
| Kingella kingoe PYKK081 | 381401699 | 2 |
| Lactobacillus coryniformis subsp. torquens KCTC 3535 | 336393381 | 2 |
| Neisseria bacilliformis ATCC BAA-1200 | 329117879 | 2 |
| Neisseria cinerea ATCC 14685 | 261378287 | 2 |
| Neisseria flovescens SK114 | 241759613 | 2 |
| Neisseria lactamica 020-06 | 313669044 | 2 |
| Neisseria meningitidis 053442 | 161869390 | 2 |
| Neisseria meningitidis 2007056 | 433531983 | 2 |
| Neisseria meningitidis 63049 | 433514137 | 2 |
| Neisseria meningitidis 8013 | 385324780 | 2 |
| Neisseria meningitidis 92045 | 421559784 | 2 |
| Neisseria meningitidis 93003 | 421538794 | 2 |
| Neisseria meningitidis 93004 | 421541126 | 2 |
| Neisseria meningitidis 96023 | 433518260 | 2 |
| Neisseria meningitidis 98008 | 421555531 | 2 |
| Neisseria meningitidis alpha14 | 254804356 | 2 |
| Neisseria meningitidis alpha275 | 254672046 | 2 |
| Neisseria meningitidis ATCC 13091 | 304388355 | 2 |
| Neisseria meningitidis N1568 | 416164244 | 2 |
| Neisseria meningitidis NM140 | 421545139 | 2 |
| Neisseria meningitidis NM220 | 418291220 | 2 |
| Neisseria meningitidis NM233 | 418288950 | 2 |
| Neisseria meningitidis WUE 2594 | 385337435 | 2 |
| Neisseria meningitidis Z2491 | 218767588 | 2 |
| Neisseria sp. oral taxon 14 str. F0314 | 298369677 | 2 |
| Neisseria wadsworthii 9715 | 350570326 | 2 |
| Pasteurella multocida subsp. gallicida X73 | 425063822 | 2 |
| Pasteurella multocida subsp. multocida str. P52VAC | 421263876 | 2 |
| Pasteurella multocida subsp. multocida str. Pm70 | 15602992 | 2 |
| Phascolarctobacteriurn succinatutens YIT 12067 | 323142435 | 2 |
| Roseburia intestinalis L1-82 | 257413184 | 2 |
| Roseburia intestinalis M50/1 | 291537230 | 2 |
| Roseburia inulinivorans DSM 16841 | 225377804 | 2 |
| Simonsiella muelleri ATCC 29453 | 404379108 | 2 |
| Sporalactobacillus vineae DSM 21990 = SL153 | 404330915 | 2 |
| Subdoligranulum sp. 4_3_54A2FAA | 365132400 | 2 |
| Wolinella succinogenes DSM 1740 | 34557790 | 2 |
| Catellicaccus marimammalium M35/04/3 | 424780480 | 3 |
| Clostridium spiroforme DSM 1552 | 169349750 | 3 |
| Enterococcus faecalis Fly1 | 257084992 | 3 |
| Enterococcus faecalis R508 | 424761124 | 3 |
| Enterococcus faecalis T11 | 257419486 | 3 |
| Enterococcus faecalis7X0012 | 315149830 | 3 |
| Enterococcus faecalis TX0012 | 422729710 | 3 |
| Enterococcus faecalis 7X1342 | 422701955 | 3 |
| Eubacterium dolichurn DSM 3991 | 160915782 | 3 |
| Eubacterium rectale ATCC 33656 | 238924075 | 3 |
| Eubacterium ventriosum ATCC 27560 | 154482474 | 3 |
| Facklamia hominis CCUG 36813 | 406671118 | 3 |
| Lactobacillus farciminis KCTC 3681 | 336394701 | 3 |
| Listeriaceae bacterium TTU M1-001 | 381184145 | 3 |
| Staphylococcus aureus subsp. aureus | 403411236 | 3 |
| Staphylococcus lugdunensis M23590 | 315659848 | 3 |
| Streptococcus anginosus 1_2_62CV | 319939170 | 3 |
| Streptococcus gallolyticus UCN34 | 288905632 | 3 |
| Streptococcus gordonii str. Challis substr. CH1 | 157150687 | 3 |
| Streptococcus infantarius ATCC BAA-102 | 171779984 | 3 |
| Streptococcus macedonicus ACA-DC 198 | 374338350 | 3 |
| Streptococcus mitis ATCC 6249 | 306829274 | 3 |
| Streptococcus mutans NLML5 | 449203378 | 3 |
| Streptococcus mutans NLML5 | 450064617 | 3 |
| Streptococcus mutans NLML8 | 449151037 | 3 |
| Streptococcus mutans NLML8 | 450133520 | 3 |
| Streptococcus mutans ST1 | 449228751 | 3 |
| Streptococcus mutans ST1 | 450114718 | 3 |
| Streptococcus mutans U2A | 449232458 | 3 |
| Streptococcus mutans U2A | 450125471 | 3 |
| Streptococcus oralis SK1074 | 418974877 | 3 |
| Streptococcus oralis SK313 | 417940002 | 3 |
| Streptococcus parasanguinis F0449 | 419799964 | 3 |
| Streptococcus pasteurianus ATCC 43144 | 336064611 | 3 |
| Streptococcus salivarius JIM8777 | 387783792 | 3 |
| Streptococcus salivarius PS4 | 419707401 | 3 |
| Streptococcus sp. BS35b | 401684660 | 3 |
| Streptococcus sp. C150 | 322372617 | 3 |
| Streptococcus sp. GMD6S | 406576934 | 3 |
| Streptococcus suis 89/1591 | 223932525 | 3 |
| Streptococcus suis D9 | 386584496 | 3 |
| Streptococcus suis ST3 | 330833104 | 3 |
| Streptococcus thermophilus CNRZ1055 | 55822627 | 3 |
| Streptococcus thermophilus JIM 8232 | 386344353 | 3 |
| Streptococcus thermophilus LMD-9 | 116627542 | 3 |
| Streptococcus thermophilus LMG 18311 | 55820735 | 3 |
| Streptococcus thermophilus MN-ZLW-002 | 387909441 | 3 |
| Streptococcus thermophilus MTCC 5450 | 445374534 | 3 |
| Streptococcus thermophilus ND03 | 386086348 | 3 |
| Streptococcus vestibularis ATCC 49124 | 322517104 | 3 |
| Anaerophaga sp. HS1 | 371776944 | 4 |
| Anaerophaga thermohalophila DSM 12881 | 346224232 | 4 |
| Bacteroides coprophilus DSM 18228 | 224026357 | 4 |
| Bacteroides coprosuis DSM 18011 | 333031006 | 4 |
| Bacteroides dorei DSM 17855 | 212694363 | 4 |
| Bacteroides eggerthii 1_2_48FAA | 317474201 | 4 |
| Bacteroides faecis 27-5 | 380696107 | 4 |
| Bacteroides fluxus YIT 12057 | 329965125 | 4 |
| Bacteroides nordii CL02T12C05 | 393788929 | 4 |
| Bacteroides sp. 20_3 | 301311869 | 4 |
| Bacteroides sp. D2 | 383115507 | 4 |
| Bacteroides uniformis CL03T00C23 | 423303159 | 4 |
| Bacteroides vulgatus CL09T03C04 | 423312075 | 4 |
| Bergeyella zoohelcum ATCC 43767 | 423317190 | 4 |
| Capnocytophaga gingivalis ATCC 33624 | 228473057 | 4 |
| Capnocytophaga sp. CM59 | 402830627 | 4 |
| Capnocytophaga sp. oral taxon 324 str. F0483 | 429756885 | 4 |
| Capnocytophaga sp. oral taxon 326 str. F0382 | 429752492 | 4 |
| Capnocytophaga sp. oral taxon 412 str. F0487 | 393778597 | 4 |
| Chryseobacterium sp. CF314 | 399023756 | 4 |
| Fibrobacter succinogenes subsp. succinogenes S85 | 261414553 | 4 |
| Flavobacteriaceae bacterium S85 | 372210605 | 4 |
| Flavobacterium columnare ATCC 49512 | 365960762 | 4 |
| Fluviicola taffensis D5M 16823 | 327405121 | 4 |
| Ignavibacterium album JCM 16511 | 385811609 | 4 |
| Mucilaginibacter paludis DSM 18603 | 373954054 | 4 |
| Myroides odoratus DSM 2801 | 374597806 | 4 |
| Ornithobacterium rhinotracheale DSM 15997 | 392391493 | 4 |
| Prevotella bivia JCVIHMP010 | 282858617 | 4 |
| Prevotella buccae ATCC 33574 | 315607525 | 4 |
| Prevotella nigrescens ATCC 33563 | 340351024 | 4 |
| Prevotella sp. M5X73 | 402307189 | 4 |
| Prevotella timonensis CRIS SC-B1 | 282881485 | 4 |
| Prevotella veroralis F0319 | 260592128 | 4 |
| Sphingobacterium spiritivorum ATCC 33861 | 300771242 | 4 |
| Weeksella virosa DSM 16922 | 325955459 | 4 |
| Acidovorax avenae subsp. avenae ATCC 19860 | 326315085 | 5 |
| Alicycliphilus denitrificans BC | 319760940 | 5 |
| Alicycliphilus denitrificans K601 | 330822845 | 5 |
| Azospirillum sp. 8510 | 288957741 | 5 |
| Bradyrhizabium sp. BTAi1 | 148255343 | 5 |
| Candidatus Puniceispirillum marinum IMCC1322 | 294086111 | 5 |
| Dinoroseabacter shibae DFL 12 | 159042956 | 5 |
| gamma proteobacterium HdN1 | 304313029 | 5 |
| Nitrobacter hamburgensis X14 | 92109262 | 5 |
| Nitrosomonas sp. AL212 | 325983496 | 5 |
| Ralstonia syzygii R24 | 344171927 | 5 |
| Rhodovulum sp. PH10 | 402849997 | 5 |
| Sphingobium sp. AP49 | 398385143 | 5 |
| Sphingomonas sp. S17 | 332188827 | 5 |
| Verminephrobacter eiseniae EF01-2 | 121608211 | 5 |
| Bacteroides fragilis 638R | 375360193 | 6 |
| Bacteroides fragilis NCTC 9343 | 60683389 | 6 |
| Bacteroides sp. 2_1_16 | 265767599 | 6 |
| Bacteroides sp. 3_1_19 | 298377533 | 6 |
| Bacteroides sp. D2 | 383110723 | 6 |
| Bacteroidetes oral taxon 274 str. F0058 | 298373376 | 6 |
| Barnesiella intestinihominis YIT 11860 | 404487228 | 6 |
| Belliella baltica DSM 15883 | 390944707 | 6 |
| Bergeyella zoohelcum CCUG 30536 | 406673990 | 6 |
| Capnocytophaga canimorsus Cc5 | 340622236 | 6 |
| Capnocytophaga ochracea DSM 7271 | 256819408 | 6 |
| Capnocytophaga sp. oral taxon 329 str. F0087 | 332882466 | 6 |
| Capnocytophaga sp. oral taxon 335 str. F0486 | 420149252 | 6 |
| Capnocytophaga sp. oral taxon 380 str. F0488 | 429748017 | 6 |
| Capnocytophaga sputigena Capno | 213962376 | 6 |
| Flavobacterium psychrophilum JIP02/86 | 150025575 | 6 |
| Galbibacter sp. ck-I2-15 | 408370397 | 6 |
| Indibacter alkaliphilus LW1 | 404451234 | 6 |
| Joostella marina DSM 19592 | 386818981 | 6 |
| Kordia algicida OT-1 | 163754820 | 6 |
| Marinilabilia sp. AK2 | 410030899 | 6 |
| Myroides injenensis M09-0166 | 399927444 | 6 |
| Niabella soli DSM 19437 | 374372722 | 6 |
| Parabacteroides johnsonii DSM 18315 | 218258638 | 6 |
| Parabacteroides sp. D13 | 256840409 | 6 |
| Porphyromonas sp. oral taxon 279 str. F0450 | 402847315 | 6 |
| Prevotella histicola F0411 | 357042839 | 6 |
| Prevotella intermedia 17 | 387132277 | 6 |
| Prevotella nigrescens F0103 | 445119230 | 6 |
| Prevotella oralis ATCC 33269 | 323344874 | 6 |
| Prevotella sp. oral taxon 306 str. F0472 | 383811446 | 6 |
| Riemerella anatipestifer RA-CH-1 | 407451859 | 6 |
| Riemerella anatipestifer RA-GD | 386321727 | 6 |
| Zunongwangia profunda SM-A87 | 295136244 | 6 |
| Actinomyces coleocanis DSM 15436 | 227494853 | 7 |
| Actinomyces georgiae F0490 | 420151340 | 7 |
| Actinomyces naeslundii str. Howell 279 | 400293272 | 7 |
| Actinomyces sp. ICM47 | 396585058 | 7 |
| Actinomyces sp. oral taxon 175 str. F0384 | 343523232 | 7 |
| Actinomyces sp. oral taxon 181 str. F0379 | 429758968 | 7 |
| Actinomyces sp. oral taxon 848 str. F0332 | 269219760 | 7 |
| Actinomyces turicensis ACS-279-V-Col4 | 405979650 | 7 |
| Bifidobacterium dentium 8d1 | 283456135 | 7 |
| Bifidobacterium longum DJO10A | 189440764 | 7 |
| Bifidobacterium longum subsp. longum 2-28 | 419852381 | 7 |
| Bifidobacterium longum subsp. longum KACC91563 | 384200944 | 7 |
| Bifidobacterium sp. 12_1_478FAA | 317482066 | 7 |
| Corynebacterium accolens ATCC 49725 | 227502575 | 7 |
| Corynebacterium accolens ATCC 49726 | 306835141 | 7 |
| Corynebacterium diphtheriae 241 | 375289763 | 7 |
| Corynebacterium diphtheriae 31A | 376283539 | 7 |
| Corynebacterium diphtheriae BH8 | 376286566 | 7 |
| Corynebacterium diphtheriae bv. intermedius str. NCTC 5011 | 419861895 | 7 |
| Corynebacterium diphtheriae C7 (beta) | 376289243 | 7 |
| Corynebacterium diphtheriae HC02 | 376292154 | 7 |
| Corynebacterium diphtheriae NCTC 13129 | 38232678 | 7 |
| Corynebacterium diphtheriae VA01 | 376256051 | 7 |
| Corynebacterium matruchotii ATCC 14266 | 305681510 | 7 |
| Corynebacterium matruchotii ATCC 33806 | 225021644 | 7 |
| Gardnerella vaginalis 1500E | 415717744 | 7 |
| Gardnerella vaginalis 284V | 415703177 | 7 |
| Gardnerella vaginalis 5-1 | 298252606 | 7 |
| Mobiluncus curtisii subsp. holmesii ATCC 35242 | 315656340 | 7 |
| Mobiluncus mulieris 28-1 | 269977848 | 7 |
| Mobiluncus mulieris F8024-16 | 307700167 | 7 |
| Scardovia inopinata F0304 | 294790575 | 7 |
| Actinomyces sp. oral taxon 180 str. F0310 | 315605738 | 8 |
| Gluconacetobacter diazotrophicus PAI 5 | 209542524 | 8 |
| Gluconacetobacter diazotrophicus PAI 5 | 162147907 | 8 |
| Methylocystis sp. ATCC 49242 | 323139312 | 8 |
| Methylosinus trichosporium O83b | 296446027 | 8 |
| Rhodopseudomonas palustris BisB18 | 90425961 | 8 |
| Rhodopseudornonas palustris BisB5 | 91975509 | 8 |
| Tistrella mobilis KA081020-065 | 389874754 | 8 |
| Mycoplasma canis PG 14 | 384393286 | 9 |
| Mycoplasma canis PG 14 | 419703974 | 9 |
| Mycoplasma canis UF31 | 384937953 | 9 |
| Mycoplasma canis UF33 | 419704625 | 9 |
| Mycoplasma canis UFG1 | 419705269 | 9 |
| Mycoplasma canis UFG4 | 419705920 | 9 |
| Mycoplasma cynos C142 | 433625054 | 9 |
| Mycoplasma gallisepticum NC95_13295-2-2P | 401767318 | 9 |
| Mycoplasma gallisepticum NY01_2001.047-5-1P | 401768851 | 9 |
| Mycoplasma gallisepticum str. F | 284931710 | 9 |
| Mycoplasma gallisepticum str. F | 385326554 | 9 |
| Mycoplasma gallisepticum str. R(low) | 294660600 | 9 |
| Mycoplasma synoviae 53 | 71894592 | 9 |
| Mycoplasma synoviae 53 | 144575181 | 9 |
| Prevotella buccalis ATCC 35310 | 282878504 | 10 |
| Prevotella ruminicola 23 | 294674019 | 10 |
| Prevotella stercorea DSM 18206 | 359406728 | 10 |
| Prevotella tannerae ATCC 51259 | 258648111 | 10 |
| Prevotella timonensis CRIS 5C-81 | 282880052 | 10 |
| Burkholderiales bacterium 1_1_47 | 303257695 | 11 |
| Parasutterella excrementihominis YIT 11859 | 331001027 | 11 |
| Sutterella wadsworthensis 3_1_458 | 319941583 | 11 |
| Elusimicrobium minutum Pei191 | 187250660 | 12 |
| Sphaerochaeta globus str. Buddy | 325972003 | 12 |
| uncultured Termite group 1 bacterium phylotype Rs-D17 | 189485059 | 12 |
| Flavobacterium branchiophilum FL-15 | 347536497 | 13 |
| Flavobacterium columnare ATCC 49512 | 365959402 | 13 |
| Odoribacter laneus YIT 12061 | 374384763 | 13 |
| Prevotella denticola CRIS 18C-A | 325859619 | 14 |
| Prevotella micans F0438 | 373501184 | 14 |
| Prevotella sp. C561 | 345885718 | 14 |
| Francisella tularensis subsp. tularensis WY96-3418 | 134302318 | 15 |
| Francisella cf. novicida 3523 | 387824704 | 16 |
| Francisella cf. novicida Fx1 | 385792694 | 16 |
| Francisella novicida FTG | 208779141 | 16 |
| Francisella novicida GA99-3548 | 254374175 | 16 |
| Francisella novicida U112 | 118497352 | 16 |
| Francisella tularensis subsp. novicida GA99-3549 | 254372717 | 16 |
| Wolinella succinogenes DSM 1740 | 34557932 | 17 |
| gamma proteobacterium HTCC5015 | 254447899 | 18 |
| Legionella pneumophila 130b | 307608922 | 19 |
| Legionella pneumophila str. Paris | 54296138 | 19 |
| Mycoplasma ovipneumoniae SC01 | 363542550 | 20 |
| Streptobacillus moniliformis DSM 12112 | 269123826 | 21 |
| Mycoplasma mobile 163K | 47458868 | 22 |
| Alcanivorax sp. W11-5 | 407803669 | 23 |
| Caenispirillum salinarum AK4 | 427429481 | 23 |
| Rhodospirillum rubrum ATCC 11170 | 83591793 | 23 |
| Treponema sp. JC4 | 384109266 | 23 |
| Ruminococcus albus 8 | 325677756 | 24 |
| uncultured delta proteobacterium HF0070_07619 | 297182908 | 24 |
| Acidothermus cellulolyticus 11B | 117929158 | 25 |
| Nitrabfractor salsuginis DSM 16511 | 319957206 | 26 |
| Akkermansia muciniphila ATCC BAA-835 | 187736489 | 27 |
| Parvibaculum lavamentivorans DS-1 | 154250555 | 28 |

### Example 6

### Phylogenetic Clustering of Cas9 Defines Dual-RNA:Cas9 Exchangeability

[0505] As described above, clustering of Cas9 orthologs correlates with the ability to substitute for the RNA-stabilizing role of S. pyogenes Cas9 in tracrRNA:pre-crRNA processing by RNase III in vivo (FIG. 4B). The exchangeability between Cas9 and dual-RNA in closely related CRISPR-Cas systems was investigated at the level of DNA interference.

[0506] Plasmid cleavage assays were performed using S. pyogenes Cas9 complexed with dual-RNAs from selected CRISPR-Cas systems representative of the clustering of the type II CRISPR-Cas systems. As shown in FIG. 6A (upper panel), S. pyogenes Cas9 can cleave target DNA in the presence of dual-RNAs from S. mutans and S. thermophilus* (type II-A, yellow subcluster), but not from any other tested species. The same result was observed when the dual-RNA from S. pyogenes was incubated with Cas9 orthologs from different bacteria (FIG. 6A, lower panel). Cleavage assays were also performed with all Cas9 orthologs incubated with cognate and non-cognate dual-RNAs on their PAM-specific plasmid DNA. Only the combinations of Cas9 and dual-RNA within the same type II subcluster conferred dsDNA cleavage activity (FIG. 6B, Supplementary FIG. S10). More striking was the gradient of activity dependent on how closely related the species are in the corresponding type II group. This effect can be observed for C. jejuni Cas9 that is able to cleave DNA in the presence of dual-RNA from P. multocida and N. meningitidis, but not as efficient as with its own RNA (type II-C, blue subcluster). This finding is in good agreement with the phylogenetic tree of Cas9 (FIG. 1A) showing that all three Cas9 orthologs belong to type II-C but C. jejuni Cas9 clusters more distantly from P. multocida and N. meningitidis Cas9. This effect was even greater for S. thermophilus** Cas9 which belongs to type II-A together with S. pyogenes, S. mutans and S. thermophilus*. However, none of the dual-RNAs from the three latter loci could direct DNA cleavage by S. thermophilus** Cas9. This result supports the recent findings demonstrating the lack of exchangeability between Cas9 from CRISPR1 and CRISPR3 of S. thermophilus DGCC7710 with regard to dual-RNA binding (17). Cas9 and tracrRNA:crRNA interchangeability is contemplated to directly result from Cas9 co-evolution with dual-RNA and follows the Cas9 phylogeny that may differ from the phylogeny of the respective bacterial species due to horizontal transfer.

[0507] Thus, to investigate the interchangeability between type II subgroups at the level of DNA interference, the PAMs specific for each of the 8 selected Cas9 orthologs (28) were determined. By aligning potential crRNA-targeted sequences, conserved motifs adjacent to the protospacers in all selected species were identified. These motifs were then shown to be essential for DNA interference activity of the cognate dual-RNA:Cas9 complex in vitro. The interchangeability between dual-RNA and Cas9 from different subclusters was tested using plasmid cleavage assays. Only closely related Cas9 proteins can exchange their cognate dual-RNAs and still exert cleavage activity when using the Cas9 specific PAM. The specificity of Cas9 towards dual-RNAs is highly sensitive to the Cas9 sequence relatedness. This sensitivity is observed with Cas9 from C. jejuni that displays full cleavage activity with its cognate dual-RNA but reduced activity with dual-RNAs from N. meningitidis or P. multocida which belong to different subclusters of type II-C. It is contemplated that Cas9 possesses specificity for the secondary structure of dual-RNAs, given that bioinformatics predictions suggest similar structures of repeat:antirepeat duplexes in closely related CRISPR-Cas systems (Supplementary FIG. S12).

[0508] While the present invention has been described in terms of specific embodiments, it is understood that variations and modifications will occur to those skilled in the art. Accordingly, only such limitations as appear in the claims should be placed on the invention.

### DOCUMENTS CITED

[0509] All publications and patents cited in this specification are herein incorporated by reference as if each individual publication or patent were specifically and individually indicated to be incorporated by reference and are incorporated herein by reference to disclose and describe the methods and/or materials in connection with which the publications are cited. The citation of any publication is for its disclosure prior to the filing date and should not be construed as an admission that the present invention is not entitled to antedate such publication by virtue of prior invention. Further, the dates of publication provided may be different from the actual publication dates which may need to be independently confirmed.
[0510] 1. Cho, S. W., Kim, S., Kim, J. M. and Kim, J. S. (2013) Targeted genome engineering in human cells with the Cas9 RNA-guided endonuclease. Nat. Biotechnol., 31, 230-232.
[0511] 2. Cong, L., Ran, E A., Cox, D., Lin, S., Barretto, R., Habib, N., Hsu, P. D., Wu, X., Jiang, W., Marraffini, L. A. et al. (2013) Multiplex genome engineering using CRISPR/Cas systems. Science, 339, 819-823.
[0512] 3. DiCarlo, J. E., Norville, J. E., Mali, P., Rios, X., Aach, J. and Church, G. M. (2013) Genome engineering in Saccharomyces cerevisiae using CRISPR-Cas systems. Nucleic Acids Res., 41, 4336-4343.
[0513] 4. Friedland, A. E., Tzur, Y. B., Esvelt, K. M., Colaiacovo, M. P. Church, G. M. and Calarco, J. A. (2013) Heritable genome editing in C. elegans via a CRISPR-Cas9 system. Nat. Methods, 10, 741-743.
[0514] 5. Gratz, S. J., Cummings, A. M., Nguyen, J. N., Hamm, D. C., Donohue, L. K., Harrison, M. M., Wildonger, J. and O'Connor-Giles, K. M. (2013) Genome engineering of Drosophila with the CRISPR RNA-guided Cas9 nuclease. Genetics, 194, 1029-1035.
[0515] 6. Hwang, W. Y., Fu, Y., Reyon, D., Maeder, M. L., Tsai, S. Q., Sander, J. D., Peterson, R. T., Yeh, J. R. and Joung, J. K. (2013) Efficient genome editing in zebrafish using a CRISPR-Cas system. Nat. Biotechnol., 31, 227-229.
[0516] 7. Jiang, W., Bikard, D., Cox, D., Zhang, F. and Marraffini, L. A. (2013) RNA-guided editing of bacterial genomes using CRISPR-Cas systems. Nat. Biotechnol., 31, 233-239.
[0517] 8. Mali, P., Yang, L., Esvelt, K. M., Aach, J., Guell, M., Dicarlo, J. E., Norville, J. E. and Church, G. M. (2013) RNA-guided human genome engineering via Cas9. Science, 339, 823-826.
[0518] 9. Shen, B., Zhang, J., Wu, H., Wang, J., Ma, K., Li, Z., Zhang, X., Zhang, P. and Huang, X. (2013) Generation of gene-modified mice via Cas9/RNA-mediated gene targeting. Cell Res., 23, 720-723.
[0519] 10. Wang, H., Yang, H., Shivalila, C. S., Dawlaty, M. M., Cheng, A. W., Zhang, F. and Jaenisch, R. (2013) One-step generation of mice carrying mutations in multiple genes by CRISPR/Cas-mediated genome engineering. Cell, 153, 910-918.
[0520] 11. Jinek, M., East, A., Cheng, A., Lin, S., Ma, E. and Doudna, J. (2013) RNA-programmed genome editing in human cells. eLIFE, 2, e00471.
[0521] 12. Li, J. F., Norville, J. E., Aach, J., McCormack, M., Zhang, D., Bush, J., Church, G. M. and Sheen, J. (2013) Multiplex and homologous recombination-mediated genome editing in Arabidopsis and Nicotiana benthamiana using guide RNA and Cas9. Nat. Biotechnol., 31, 688-691.
[0522] 13. Nekrasov, V., Staskawicz, B., Weigel, D., Jones, J. D. and Kamoun, S. (2013) Targeted mutagenesis in the model plant Nicotiana benthamiana using Cas9 RNA-guided endonuclease. Nat. Biotechnol., 31, 691-693.
[0523] 14. Jinek, M., Chylinski, K., Fonfara, I., Hauer, M., Doudna, J. A. and Charpentier, E. (2012) A programmable dual-RNA-guided DNA endonuclease in adaptive bacterial immunity. Science, 337, 816-821.
[0524] 15. Chylinski, K., Le Rhun, A. and Charpentier, E. (2013) The tracrRNA and Cas9 families of type II CRISPR-Cas immunity systems. RNA Biol., 10, 726-737.
[0525] 16. Deltcheva, E., Chylinski, K., Sharma, C. M., Gonzales, K., Chao, Y., Pirzada, Z. A., Eckert, M. R., Vogel, J. and Charpentier, E. (2011) CRISPR RNA maturation by trans-encoded small RNA and host factor RNase III. Nature, 471, 602-607.
[0526] 17. Karvelis, T., Gasiunas, G., Miksys, A., Barrangou, R., Horvath, P. and Siksnys, V. (2013) crRNA and tracrRNA guide Cas9-mediated DNA interference in Streptococcus thermophilus. RNA Biol., 10, 841-851.
[0527] 18. Garneau, J. E., Dupuis, M. E., Villion, M., Romero, D. A., Barrangou, R., Boyaval, P., Fremaux, C., Horvath, P., Magadan, A. H. and Moineau, S. (2010) The CRISPR/Cas bacterial immune system cleaves bacteriophage and plasmid DNA. Nature, 468, 67-71.
[0528] 19. Magadan, A. H., Dupuis, M. E., Villion, M. and Moineau, S. (2012) Cleavage of phage DNA by the Streptococcus thermophilus CRISPR3-Cas system. PLoS One, 7, e40913.
[0529] 20. Haft, D. H., Selengut, J., Mongodin, E. F. and Nelson, K. E. (2005) A guild of 45 CRISPR-associated (Cas) protein families and multiple CRISPR/Cas subtypes exist in prokaryotic genomes. PLoS Comput. Biol., 1, e60.
[0530] 21. Makarova, K. S., Grishin, N. V., Shabalina, S. A., Wolf, Y. I. and Koonin, E. V. (2006) A putative RNA-interference-based immune system in prokaryotes: computational analysis of the predicted enzymatic machinery, functional analogies with eukaryotic RNAi, and hypothetical mechanisms of action. Biol. Direct, 1, 7.
[0531] 22. Gasiunas, G., Barrangou, R., Horvath, P. and Siksnys, V. (2012) Cas9-crRNA ribonucleoprotein complex mediates specific DNA cleavage for adaptive immunity in bacteria. Proc. Natl. Acad. Sci. U.S.A, 109, E2579-2586.
[0532] 23. Sapranauskas, R., Gasiunas, G., Fremaux, C., Barrangou, R., Horvath, P. and Siksnys, V. (2011) The Streptococcus thermophilus CRISPR/Cas system provides immunity in Escherichia coli. Nucleic Acids Res., 39, 9275-9282.
[0533] 24. Mali, P., Aach, J., Stranges, P. B., Esvelt, K. M., Moosburner, M., Kosuri, S., Yang, L. and Church, G. M. (2013) Cas9 transcriptional activators for target specificity screening and paired nickases for cooperative genome engineering. Nat Biotechnol., 31, 833-838.
[0534] 25. Ran, E A., Hsu, P. D., Lin, C. Y., Gootenberg, J. S., Konermann, S., Trevino, A. E., Scott, D. A., Inoue, A., Matoba, S., Zhang, Y. et al. (2013) Double nicking by RNA-guided CRISPR Cas9 for enhanced genome editing specificity. Cell, 154, 1380-1389.
[0535] 26. Deveau, H., Barrangou, R., Garneau, W E., Labonte, J., Fremaux, C., Boyaval, P., Romero, D. A., Horvath, P. and Moineau, S. (2008) Phage response to CRISPR-encoded resistance in Streptococcus thermophilus. J. Bacteriol., 190, 1390-1400.
[0536] 27. Horvath, P., Romero, D. A., Coute-Monvoisin, A. C., Richards, M., Deveau, H., Moineau, S., Boyaval, P., Fremaux, C. and Barrangou, R. (2008) Diversity, activity, and evolution of CRISPR loci in Streptococcus thermophilus. J. Bacteriol., 190, 1401-1412.
[0537] 28. Mojica, F. J., Diez-Villasenor, C., Garcia-Martinez, J. and Almendros, C. (2009) Short motif sequences determine the targets of the prokaryotic CRISPR defense system. Microbiology, 155, 733-740.
[0538] 29. Bikard, D., Jiang, W., Samai, P., Hochschild, A., Zhang, F. and Marraffini, L. A. (2013) Programmable repression and activation of bacterial gene expression using an engineered CRISPR-Cas system. Nucleic Acids Res., 41, 7429-7437.
[0539] 30. Qi, L. S., Larson, M. H., Gilbert, L. A., Doudna, J. A., Weissman, J. S., Arkin, A. P. and Lim, W. A. (2013) Repurposing CRISPR as an RNA-guided platform for sequence-specific control of gene expression. Cell, 152, 1173-1183.
[0540] 31. Charpentier, E. and Doudna, J. A. (2013) Biotechnology: Rewriting a genome. Nature, 495, 50-51.
[0541] 32. Horvath, P. and Barrangou, R. (2013) RNA-guided genome editing a la carte. Cell Res., 23, 733-734.
[0542] 33. van der Oost, J. (2013) Molecular biology. New tool for genome surgery. Science, 339, 768-770.
[0543] 34. Hou, Z., Zhang, Y., Propson, N. E., Howden, S. E., Chu, L. F., Sontheimer, E. J. and Thomson, J. A. (2013) Efficient genome engineering in human pluripotent stem cells using Cas9 from Neisseria meningitidis. Proc. Natl. Acad. Sci. U.S.A, 110, 15644-15649.
[0544] 35. Sambrook, J., Fritsch, E. F. and Maniatis, T. (1989) Molecular Cloning: a Laboratory Manual. 2nd edn. Cold Spring Harbor, N.Y. ed. Cold Spring Harbor Laboratory Press.
[0545] 36. Caparon, M. G. and Scott, J. R. (1991) Genetic manipulation of pathogenic streptococci. Methods Enzymol., 204, 556-586.
[0546] 37. Kirsch, R. D. and Joly, E. (1998) An improved PCR-mutagenesis strategy for two-site mutagenesis or sequence swapping between related genes. Nucleic Acids Res., 26, 1848-1850.
[0547] 38. Siller, M., Janapatla, R. P., Pirzada, Z. A., Hassler, C., Zinkl, D. and Charpentier, E. (2008) Functional analysis of the group A streptococcal luxS/AI-2 system in metabolism, adaptation to stress and interaction with host cells. BMC Microbiol., 8, 188.
[0548] 39. Mangold, M., Siller, M., Roppenser, B., Vlaminckx, B. J., Penfound, T. A., Klein, R., Novak, R., Novick, R. P. and Charpentier, E. (2004) Synthesis of group A streptococcal virulence factors is controlled by a regulatory RNA molecule. Mol. Microbiol., 53, 1515-1527.
[0549] 40. Herbert, S., Barry, P. and Novick, R. P. (2001) Subinhibitory clindamycin differentially inhibits transcription of exoprotein genes in Staphylococcus aureus. Infect. Immun., 69, 2996-3003.
[0550] 41. Pall, G. S. and Hamilton, A. J. (2008) Improved northern blot method for enhanced detection of small RNA. Nat. Protoc., 3, 1077-1084.
[0551] 42. Urban, J. H. and Vogel, J. (2007) Translational control and target recognition by Escherichia coli small RNAs in vivo. Nucleic Acids Res., 35, 1018-1037.
[0552] 43. McClelland, M., Hanish, J., Nelson, M. and Patel, Y. (1988) KGB: a single buffer for all restriction endonucleases. Nucleic Acids Res., 16, 364.
[0553] 44. Makarova, K S., Haft, D. H., Barrangou, R., Brouns, S. J., Charpentier, E., Horvath, P., Moineau, S., Mojica, F. J., Wolf, Y. I., Yakunin, A. F. et al. (2011) Evolution and classification of the CRISPR-Cas systems. Nat. Rev. Microbiol., 9, 467-477.
[0554] 45. Altschul, S. F., Madden, T. L., Schaffer, A. A., Zhang, J., Zhang, Z., Miller, W. and Lipman, D. J. (1997) Gapped BLAST and PSI-BLAST: a new generation of protein database search programs. Nucleic Acids Res., 25, 3389-3402.
[0555] 46. Wheeler, D. and Bhagwat, M. (2007) BLAST QuickStart: example-driven web-based BLAST tutorial. Methods Mol. Biol., 395, 149-176.
[0556] 47. Edgar, R. C. (2004) MUSCLE: multiple sequence alignment with high accuracy and high throughput. Nucleic Acids Res., 32, 1792-1797.
[0557] 48. Soding, J., Biegert, A. and Lupas, A. N. (2005) The HHpred interactive server for protein homology detection and structure prediction. Nucleic Acids Res., 33, W244-248.
[0558] 49. Price, M. N., Dehal, P. S. and Arkin, A. P. (2010) FastTree 2—approximately maximum-likelihood trees for large alignments. PLoS One, 5, e9490.
[0559] 50. Bernhart, S. H., Tafer, H., Muckstein, U., Flamm, C., Stadler, P. F. and Hofacker, I. L. (2006) Partition function and base pairing probabilities of RNA heterodimers. Algorithms Mol. Biol., 1, 3.
[0560] 51. Hofacker, I. L., Fekete, M. and Stadler, P. F. (2002) Secondary structure prediction for aligned RNA sequences. Journal of molecular biology, 319, 1059-1066.
[0561] 52. Darty, K., Denise, A. and Ponty, Y. (2009) VARNA: Interactive drawing and editing of the RNA secondary structure. Bioinformatics, 25, 1974-1975.
[0562] 53. Bhaya, D., Davison, M. and Barrangou, R. (2011) CRISPR-Cas systems in bacteria and archaea: versatile small RNAs for adaptive defense and regulation. Annu. Rev. Genet., 45, 273-297.
[0563] 54. Zhang, Y., Heidrich, N., Ampattu, B. J., Gunderson, C. W., Seifert, H. S., Schoen, C., Vogel, J. and Sontheimer, E. J. (2013) Processing-independent CRISPR RNAs limit natural transformation in Neisseria meningitidis. Mol. Cell, 50, 488-503.
[0564] 55. Takeuchi, N., Wolf, Y. I., Makarova, K. S. and Koonin, E. V. (2012) Nature and intensity of selection pressure on CRISPR-associated genes. J. Bacteriol., 194, 1216-1225.
[0565] 56. Makarova, K. S., Aravind, L., Wolf, Y. I. and Koonin, E. V. (2011) Unification of Cas protein families and a simple scenario for the origin and evolution of CRISPR-Cas systems. Biol. Direct., 6, 38.
[0566] 57. Barrangou, R., Fremaux, C., Deveau, H., Richards, M., Boyaval, P., Moineau, S., Romero, D. A. and Horvath, P. (2007) CRISPR provides acquired resistance against viruses in prokaryotes. Science, 315, 1709-1712.
[0567] 58. Sun, W., Li, G. and Nicholson, A. W. (2004) Mutational analysis of the nuclease domain of Escherichia coli ribonuclease III. Identification of conserved acidic residues that are important for catalytic function in vitro. Biochemistry, 43, 13054-13062.
[0568] 59. Sun, W., Jun, E. and Nicholson, A. W. (2001) Intrinsic double-stranded-RNA processing activity of Escherichia coli ribonuclease III lacking the dsRNA-binding domain. Biochemistry, 40, 14976-14984.

The application's sequence listing, which the Patent Office published only in electronic form, follows.

SEQUENCE LISTING (2701 sequences)

SEQ ID NO: 1 - protein, 1056 aa, Pasteurella multocida
MQTTNLSYILGLDLGIASVGWAVVEINENEDPIGLIDVGVRIFERAEVPKTGESLALSRRLARSTRRLIRRRAHRLLLAKRFLKREGILSTIDLEKGLPNQAWELRVAGLERRLSAIEWGAVLLHLIKHRGYLSKRKNESQTNNKELGALLSGVAQNHQLLQSDDYRTPAELALKKFAKEEGHIRNQRGAYTHTFNRLDLLAELNLLFAQQHQFGNPHCKEHIQQYMTELLMWQKPALSGEAILKMLGKCTHEKNEFKAAKHTYSAERFVWLTKLNNLRILEDGAERALNEEERQLLINHPYEKSKLTYAQVRKLLGLSEQAIFKHLRYSKENAESATFMELKAWHAIRKALENQGLKDTWQDLAKKPDLLDEIGTAFSLYKTDEDIQQYLTNKVPNSVINALLVSLNFDKFIELSLKSLRKILPLMEQGKRYDQACREIYGHHYGEANQKTSQLLPAIPAQEIRNPVVLRTLSQARKVINAIIRQYGSPARVHIETGRELGKSFKERREIQKQQEDNRTKRESAVQKFKELFSDFSSEPKSKDILKFRLYEQQHGKCLYSGKEINIHRLNEKGYVEIDHALPFSRTWDDSFNNKVLVLASENQNKGNQTPYEWLQGKINSERWKNFVALVLGSQCSAAKKQRLLTQVIDDNKFIDRNLNDTRYIARFLSNYIQENLLLVGKNKKNVFTPNGQITALLRSRWGLIKARENNNRHHALDAIVVACATPSMQQKITRFIRFKEVHPYKIENRYEMVDQESGEIISPHFPEPWAYFRQEVNIRVFDNHPDTVLKEMLPDRPQANHQFVQPLFVSRAPTRKMSGQGHMETIKSAKRLAEGISVLRIPLTQLKPNLLENMVNKEREPALYAGLKARLAEFNQDPAKAFATPFYKQGGQQVKAIRVEQVQKSGVLVRENNGVADNASIVRTDVFIKNNKFFLVPIYTWQVAKGILPNKAIVAHKNEDEWEEMDEGAKFKFSLFPNDLVELKTKKEYFFGYYIGLDRATGNISLKEHDGEISKGKDGVYRVGVKLALSFEKYQVDELGKNRQICRPQQRQPVR

SEQ ID NO: 2 - protein, 1368 aa, Streptococcus pyogenes [sequence omitted]

SEQ ID NO: 3 - protein, 1334 aa, Listeria innocua
MKKPYTIGLDIGTNSVGWAVLTDQYDLVKRKMKIAGDSEKKQIKKNFWGVRLFDEGQTAADRRMARTARRRIERRRNRISYLQGIFAEEMSKTDANFFCRLSDSFYVDNEKRNSRHPFFATIEEEVEYHKNYPTIYHLREELVNSSEKADLRLVYLALAHIIKYRGNFLIEGALDTQNTSVDGIYKQFIQTYNQVFASGIEDGSLKKLEDNKDVAKILVEKVTRKEKLERILKLYPGEKSAGMFAQFISLIVGSKGNFQKPFDLIEKSDIECAKDSYEEDLESLLALIGDEYAELFVAAKNAYSAVVLSSIITVAETETNAKLSASMIERFDTHEEDLGELKAFIKLHLPKHYEEIFSNTEKHGYAGYIDGKTKQADFYKYMKMTLENIEGADYFIAKIEKENFLRKQRTFDNGAIPHQLHLEELEAILHQQAKYYPFLKENYDKIKSLVTFRIPYFVGPLANGQSEFAWLTRKADGEIRPWNIEEKVDFGKSAVDFIEKMTNKDTYLPKENVLPKHSLCYQKYLVYNELTKVRYINDQGKTSYFSGQEKEQIFNDLFKQKRKVKKKDLELFLRNMSHVESPTIEGLEDSFNSSYSTYHDLLKVGIKQEILDNPVNTEMLENIVKILTVFEDKRMIKEQLQQFSDVLDGVVLKKLERRHYTGWGRLSAKLLMGIRDKQSHLTILDYLMNDDGLNRNLMQLINDSNLSFKSIIEKEQVTTADKDIQSIVADLAGSPAIKKGILQSLKIVDELVSVMGYPPQTIVVEMARENQTTGKGKNNSRPRYKSLEKAIKEFGSQILKEHPTDNQELRNNRLYLYYLQNGKDMYTGQDLDIHNLSNYDIDHIVPQSFITDNSIDNLVLTSSAGNREKGDDVPPLEIVRKRKVFWEKLYQGNLMSKRKFDYLTKAERGGLTEADKARFIHRQLVETRQITKNVANILHQRFNYEKDDHGNTMKQVRIVTLKSALVSQFRKQFQLYKVRDVNDYHHAHDAYLNGVVANTLLKVYPQLEPEFVYGDYHQFDWFKANKATAKKQFYTNIMLFFAQKDRIIDENGEILWDKKYLDTVKKVMSYRQMNIVKKTEIQKGEFSKATIKPKGNSSKLIPRKTNWDPMKYGGLDSPNMAYAVVIEYAKGKNKLVFEKKIIRVTIMERKAFEKDEKAFLEEQGYRQPKVLAKLPKYTLYECEEGRRRMLASANEAQKGNQQVLPNHLVTLLHHAANCEVSDGKSLDYIESNREMFAELLAHVSEFAKRYTLAEANLNKINQLFEQNKEGDIKAIAQSFVDLMAFNAMGAPASFKFFETTIERKRYNNLKELLNSTIIYQSITGLYESRKRLDD

SEQ ID NO: 4 - protein, 1368 aa, Streptococcus pyogenes
MDKKYSIGLDIGTNSVGWAVITDDYKVPSKKLKGLGNTDRHGIKKNLIGALLFDSGETAEATRLKRTARRRYTRRKNRICYLQEIFSNEMAKVDDSFFHRLEESFLVEEDKKHERHPIFGNIVDEVAYHEKYPTIYHLRKKLADSTDKVDLRLIYLALAHMIKFRGHFLIEGDLNPDNSDVDKLFIQLVQTYNQLFEENPINASRVDAKAILSARLSKSRRLENLIAQLPGEKKNGLFGNLIALSLGLTPNFKSNFDLAEDAKLQLSKDTYDDDLDNLLAQIGDQYADLFLAAKNLSDATLLSDILRVNSEITKAPLSASMIKRYDEHHQDLTLLKALVRQQLPEKYKEIFFDQSKNGYAGYIDGGASQEEFYKFIKPILEKMDGTEELLAKLNREDLLRKQRTFDNGSIPYQIHLGELHAILRRQEDFYPFLKDNREKIEKILTFRIPYYVGPLARGNSRFAWMTRKSEETITPWNFEEVVDKGASAQSFIERMTNFDKNLPNEKVLPKHSLLYEYFTVYNELTKVKYVTEGMRKPAFLSGEQKKAIVDLLFKTNRKVTVKQLKEDYFKKIECFDSVEISGVEDRFNASLGTYHDLLKIIKDKDFLDNEENEDILEDIVLTLTLFEDREMIEERLKTYAHLFDDKVMKQLKRRRYTGWGRLSRKLINGIRDKQSGKTILDFLKSDGFANRNFMQLIHDDSLTFKEDIQKAQVSGQGDSLHEHIANLAGSPAIKKGILQTVKVVDELVKVMGRHKPENIVIEMARENQTTQKGQKNSRERMKRIEEGIKELGSDILKEYPVENTQLQNEKLYLYYLQNGRDMYVDQELDINRLSDYDVDHIVPQSFLKDDSIDNKVLTRSDKNRGKSDNVPSEEVVKKMKNYWRQLLNAKLITQRKFDNLTKAERGGLSELDKVGFIKRQLVETRQITKHVAQILDSRMNTKYDENDKLIREVRVITLKSKLVSDFRKDFQFYKVREINNYHHAHDAYLNAVVGTALIKKYPKLESEFVYGDYKVYDVRKMIAKSEQEIGKATAKYFFYSNIMNFFKTEITLANGEIRKRPLIETNGETGEIVWDKGRDFATVRKVLSMPQVNIVKKTEVQTGGFSKESILPKRNSDKLIARKKDWDPKKYGGFDSPTVAYSVLVVAKVEKGKSKKLKSVKELLGITIMERSSFEKDPIDFLEAKGYKEVRKDLIIKLPKYSLFELENGRKRMLASAGELQKGNELALPSKYVNFLYLASHYEKLKGSPEDNEQKQLFVEQHKHYLDEIIEQISEFSKRVILADANLDKVLSAYNKHRDKPIREQAENIIHLFTLTNLGAPAAFKYFDTTIDRKRYTSTKEVLDATLIHQSITGLYETRIDLSQLGGD

SEQ ID NO: 5 - protein, 1370 aa, Streptococcus agalactiae
MNKPYSIGLDIGTNSVGWSIITDDYKVPAKKMRVLGNTDKEYIKKNLIGALLFDGGNTAADRRLKRTARRRYTRRRNRILYLQEIFAEEMSKVDDSFFHRLEDSFLVEEDKRGSKYPIFATLQEEKDYHEKFSTIYHLRKELADKKEKADLRLIYIALAHIIKFRGHFLIEDDSFDVRNTDISKQYQDFLEIFNTTFENNDLLSQNVDVEAILTDKISKSAKKDRILAQYPNQKSTGIFAEFLKLIVGNQADFKKYFNLEDKTPLQFAKDSYDEDLENLLGQIGDEFADLFSAAKKLYDSVLLSGILTVIDLSTKAPLSASMIQRYDEHREDLKQLKQFVKASLPEKYQEIFADSSKDGYAGYIEGKTNQEAFYKYLSKLLTKQEDSENFLEKIKNEDFLRKQRTFDNGSIPHQVHLTELKAIIRRQSEYYPFLKENQDRIEKILTFRIPYYIGPLAREKSDFAWMTRKTDDSIRPWNFEDLVDKEKSAEAFIHRMTNNDFYLPEEKVLPKHSLIYEKFTVYNELTKVRYKNEQGETYFFDSNIKQEIFDGVFKEHRKVSKKKLLDFLAKEYEEFRIVDVIGLDKENKAFNASLGTYHDLEKILDKDFLDNPDNESILEDIVQTLTLFEDREMIKKRLENYKDLFTESQLKKLYRRHYTGWGRLSAKLINGIRDKESQKTILDYLIDDGRSNRNFMQLINDDGLSFKSIISKAQAGSHSDNLKEVVGELAGSPAIKKGILQSLKIVDELVKVMGYEPEQIVVEMARENQTTNQGRRNSRQRYKLLDDGVKNLASDLNGNILKEYPTDNQALQNERLFLYYLQNGRDMYTGEALDIDNLSQYDIDHIIPQAFIKDDSIDNRVLVSSAKNRGKSDDVPSLEIVKDCKVFWKKLLDAKLMSQRKYDNLTKAERGGLTSDDKARFIQRQLVETRQITKHVARILDERFNNELDSKGRRIRKVKIVTLKSNLVSNFRKEFGFYKIREVNNYHHAHDAYLNAVVAKAILTKYPQLEPEFVYGDYPKYNSYKTRKSATEKLFFYSNIMNFFKTKVTLADGTVVVKDDIEVNNDTGEIVWDKKKHFATVRKVLSYPQNNIVKKTEIQTGGFSKESILAHGNSDKLIPRKTKDIYLDPKKYGGFDSPIVAYSVLVVADIKKGKAQKLKTVTELLGITIMERSRFEKNPSAFLESKGYLNIRADKLIILPKYSLFELENGRRRLLASAGELQKGNELALPTQFMKFLYLASRYNESKGKPEEIEKKQEFVNQHVSYFDDILQLINDFSKRVILADANLEKINKLYQDNKENISVDELANNIINLFTFTSLGAPAAFKFFDKIVDRKRYTSTKEVLNSTLIHQSITGLYETRIDLGKLGED

SEQ ID NO: 6 - protein, 1345 aa, Streptococcus mutans
MKKPYSIGLDIGTNSVGWAVVTDDYKVPAKKMKVLGNTDKSHIEKNLLGALLFDSGNTAEDRRLKRTARRRYTRRRNRILYLQEIFSEEMGKVDDSFFHRLEDSFLVTEDKRGERHPIFGNLEEEVKYHENFPTIYHLRQYLADNPEKVDLRLVYLALAHIIKFRGHFLIEGKFDTRNNDVQRLFQEFLAVYDNTFENSSLQEQNVQVEEILTDKISKSAKKDRVLKLFPNEKSNGRFAEFLKLIVGNQADFKKHFELEEKAPLQFSKDTYEEELEVLLAQIGDNYAELFLSAKKLYDSILLSGILTVTDVGTKAPLSASMIQRYNEHQMDLAQLKQFIRQKLSDKYNEVFSDVSKDGYAGYIDGKTNQEAFYKYLKGLLNKIEGSGYFLDKIEREDFLRKQRTFDNGSIPHQIHLQEMRAIIRRQAEFYPFLADNQDRIEKLLTFRIPYYVGPLARGKSDFAWLSRKSADKITPWNFDEIVDKESSAEAFINRMTNYDLYLPNQKVLPKHSLLYEKFTVYNELTKVKYKTEQGKTAFFDANMKQEIFDGVFKVYRKVTKDKLMDFLEKEFDEFRIVDLTGLDKENKVFNASYGTYHDLCKILDKDFLDNSKNEKILEDIVLTLTLFEDREMIRKRLENYSDLLTKEQVKKLERRHYTGWGRLSAELIHGIRNKESRKTILDYLIDDGNSNRNFMQLINDDALSFKEEIAKAQVIGETDNLNQVVSDIAGSPAIKKGILQSLKIVDELVKIMGHQPENIVVEMARENQFTNQGRRNSQQRLKGLTDSIKEFGSQILKEHPVENSQLQNDRLFLYYLQNGRDMYTGEELDIDYLSQYDIDHIIPQAFIKDNSIDNRVLTSSKENRGKSDDVPSKDVVRKMKSYWSKLLSAKLITQRKFDNLTKAERGGLTDDDKAGFIKRQLVETRQITKHVARILDERFNTETDENNKKIRQVKIVTLKSNLVSNFRKEFELYKVREINDYHHAHDAYLNAVIGKALLGVYPQLEPEFVYGDYPHFHGHKENKATAKKFFYSNIMNFFKKDDVRTDKNGEIIWKKDEHISNIKKVLSYPQVNIVKKVEEQTGGFSKESILPKGNSDKLIPRKTKKFYWDTKKYGGFDSPIVAYSILVIADIEKGKSKKLKTVKALVGVTIMEKMTFERDPVAFLERKGYRNVQEENIIKLPKYSLFKLENGRKRLLASARELQKGNEIVLPNHLGTLLYHAKNIHKVDEPKHLDYVDKHKDEFKELLDVVSNFSKKYTLAEGNLEKIKELYAQNNGEDLKELASSFINLLTFTAIGAPATFKFFDKNIDRKRYTSTTEILNATLIHQSITGLYETRIDLNKLGGD

SEQ ID NO: 7 - protein, 1377 aa, Streptococcus agalactiae
MNKPYSIGLDIGTNSVGWSIITDDYKVPAKKMRVLGNTDKEYIKKNLIGALLFDGGNTAADRRLKRTARRRYTRRRNRILYLQEIFAEEMSKVDDSFFHRLEDSFLVEEDKRGSKYPIFATMQEEKYYHEKFPTIYHLRKELADKKEKADLRLVYLALAHIIKFRGHFLIEDDRFDVRNTDIQKQYQAFLEIFDTTFENNHLLSQNVDVEAILTDKISKSAKKDRILAQYPNQKSTGIFAEFLKLIVGNQADFKKHFNLEDKTPLQFAKDSYDEDLENLLGQIGDEFADLFSVAKKLYDSVLLSGILTVTDLSTKAPLSASMIQRYDEHHEDLKHLKQFVKASLPENYREVFADSSKDGYAGYIEGKTNQEAFYKYLLKLLTKQEGSEYFLEKIKNEDFLRKQRTFDNGSIPHQVHLTELRAIIRRQSEYYPFLKENQDRIEKILTFRIPYYVGPLAREKSDFAWMTRKTDDSIRPWNFEDLVDKEKSAEAFIHRMTNNDLYLPEEKVLPKHSLIYEKFTVYNELTKVRFLAEGFKDFQFLNRKQKETIFNSLFKEKRKVTEKDIISFLNKVDGYEGIAIKGIEKQFNASLSTYHDLKKILGKDFLDNTDNELILEDIVQTLTLFEDREMIKKCLDIYKDFFTESQLKKLYRRHYTGWGRLSAKLINGIRNKENQKTILDYLIDDGSANRNFMQLINDDDLSFKPIIDKARTGSHSDNLKEVVGELAGSPAIKKGILQSLKIVDELVKVMGYEPEQIVVEMARENQTTAKGLSRSRQRLTTLRESLANLKSNILEEKKPKYVKDQVENHHLSDDRLFLYYLQNGRDMYTKKALDIDNLSQYDIDHIIPQAFIKDDSIDNRVLVSSAKNRGKSDDVPSIEIVKARKMFWKNLLDAKLMSQRKYDNLTKAERGGLTSDDKARFIQRQLVETRQITKHVARILDERFNNEVDNGKKICKVKIVTLKSNLVSNFRKEFGFYKIREVNDYHHAHDAYLNAVVAKAILTKYPQLEPEFVYGMYRQKKLSKIVHEDKEEKYSEATRKMFFYSNLMNMFKRVVRLADGSIVVRPVIETGRYMRKTAWDKKKHFATVRKVLSYPQNNIVKKTEIQTGGFSKESILAHGNSDKLIPRKTKDIYLDPKKYGGFDSPIVAYSVLVVADIKKGKAQKLKTVTELLGITIMERSRFEKNPSAFLESKGYLNIRDDKLMILPKYSLFELENGRRRLLASAGELQKGNELALPTQFMKFLYLASRYNESKGKPEEIEKKQEFVNQHVSYFDDILQLINDFSKRVILADANLEKINKLYQDNKENIPVDELANNIINLFTFTSLGAPAAFKFFDKIVDRKRYTSTKEVLNSTLIHQSITGLYETRIDLGKLGED

SEQ ID NO: 8 - protein, 1368 aa, Streptococcus pyogenes; identical to SEQ ID NO: 4

SEQ ID NO: 9 - protein, 131 aa, Helicobacter hepaticus
MRILGFDIGITSIGWAYVESNELKDCGVRIFTKAENPKNGDSLAAPRREARGARRRLARRKARLNAIKRLLCKEFELNLNDYLANDGELPKAYQTSKDTKSPYELYTAFHWIIFAFCSIASSLSNRQMLPI

SEQ ID NO: 10 - protein, 1059 aa, Wolinella succinogenes
MIERILGVDLGISSLGWAIVEYDKDDEAANRIIDCGVRLFTAAETPKKKESPNKARREARGIRRVLNRRRVRMNMIKKLFLRAGLIQDVDLDGEGGMFYSKANRADVWELRHDGLYRLLKGDELARVLIHIAKHRGYKFIGDDEADEESGKVKKAGVVLRQNFEAAGCRTVGEWLWRERGANGKKRNKHGDYEISIHRDLLVEEVEAIFVAQQEMRSTIATDALKAAYREIAFFVRPMQRIEKMVGHCTYFPEERRAPKSAPTAEKFIAISKFFSTVIIDNEGWEQKIIERKTLEELLDFAVSREKVEFRHLRKFLDLSDNEIFKGLHYKGKPKTAKKREATLFDPNEPTELEFDKVEAEKKAWISLRGAAKLREALGNEFYGRFVALGKHADEATKILTYYKDEGQKRRELTKLPLEAEMVERLVKIGFSDFLKLSLKAIRDILPAMESGARYDEAVLMLGVPHKEKSAILPPLNKTDIDILNPTVIRAFAQFRKVANALVRKYGAFDRVHFELAREINTKGEIEDIKESQRKNEKERKEAADWIAETSFQVPLTRKNILKKRLYIQQDGRCAYTGDVIELERLFDEGYCEIDHILPRSRSADDSFANKVLCLARANQQKTDRTPYEWFGHDAARWNAFETRTSAPSNRVRTGKGKIDRLLKKNFDENSEMAFKDRNLNDTRYMARAIKTYCEQYWVFKNSHTKAPVQVRSGKLTSVLRYQWGLESKDRESHTHHAVDAIIIAFSTQGMVQKLSEYYRFKETHREKERPKLAVPLANFRDAVEEATRIENTETVKEGVEVKRLLISRPPRARVTGQAHEQTAKPYPRIKQVKNKKKWRLAPIDEEKFESFKADRVASANQKNFYETSTIPRVDVYHKKGKFHLVPIYLHEMVLNELPNLSLGTNPEAMDENFFKFSIFKDDLISIQTQGTPKKPAKIIMGYFKNMHGANMVLSSINNSPCEGFTCTPVSMDKKHKDKCKLCPEENRIAGRCLQGFLDYWSQEGLRPPRKEFECDQGVKFALDVKKYQIDPLGYYYEVKQEKRLGTIPQMRSAKKLVKK

SEQ ID NO: 11 - protein, 1409 aa, Wolinella succinogenes
MLVSPISVDLGGKNTGFFSFTDSLDNSQSGTVIYDESFVLSQVGRRSKRHSKRNNLRNKLVKRLFLLILQEHHGLSIDVLPDEIRGLFNKRGYTYAGFELDEKKKDALESDTLKEFLSEKLQSIDRDSDVEDFLNQIASNAESFKDYKKGFEAVFASATHSPNKKLELKDELKSEYGENAKELLAGLRVTKEILDEFDKQENQGNLPRAKYFEELGEYIATNEKVKSFFDSNSLKLTDMTKLIGNISNYQLKELRRYFNDKEMEKGDIWIPNKLHKITERFVRSWHPKNDADRQRRAELMKDLKSKEIMELLTTTEPVMTIPPYDDMNNRGAVKCQTLRLNEEYLDKHLPNWRDIAKRLNHGKFNDDLADSTVKGYSEDSTLLHRLLDTSKEIDIYELRGKKPNELLVKTLGQSDANRLYGFAQNYYELIRQKVRAGIWVPVKNKDDSLNLEDNSNMLKRCNHNPPHKKNQIHNLVAGILGVKLDEAKFAEFEKELWSAKVGNKKLSAYCKNIEELRKTHGNTFKIDIEELRKKDPAELSKEEKAKLRLTDDVILNEWSQKIANFFDIDDKHRQRFNNLFSMAQLHTVIDTPRSGFSSTCKRCTAENRFRSETAFYNDETGEFHKKATATCQRLPADTQRPFSGKIERYIDKLGYELAKIKAKELEGMEAKEIKVPIILEQNAFEYEESLRKSKTGSNDRVINSKKDRDGKKLAKAKENAEDRLKDKDKRIKAFSSGICPYCGDTIGDDGEIDHILPRSHTLKIYGTVFNPEGNLIYVHQKCNQAKADSIYKLSDIKAGVSAQWIEEQVANIKGYKTFSVLSAEQQKAFRYALFLQNDNEAYKKVVDWLRTDQSARVNGTQKYLAKKIQEKLTKMLPNKHLSFEFILADATEVSELRRQYARQNPLLAKAEKQAPSSHAIDAVMAFVARYQKVFKDGTPPNADEVAKLAMLDSWNPASNEPLTKGLSTNQKIEKMIKSGDYGQKNMREVFGKSIFGENAIGERYKPIVVQEGGYYIGYPATVKKGYELKNCKVVTSKNDIAKLEKIIKNQDLISLKENQYIKIFSINKQTISELSNRYFNMNYKNLVERDKEIVGLLEFIVENCRYYTKKVDVKFAPKYIHETKYPFYDDWRRFDEAWRYLQENQNKTSSKDRFVIDKSSLNEYYQPDKNEYKLDVDTQPIWDDFCRWYFLDRYKTANDKKSIRIKARKTFSLLAESGVQGKVFRAKRKIPTGYAYQALPMDNNVIAGDYANILLEANSKTLSLVPKSGISIEKQLDKKLDVIKKTDVRGLAIDNNSFFNADFDTHGIRLIVENTSVKVGNFPISAIDKSAKRMIFRALFEKEKGKRKKKTTISFKESGPVQDYLKVFLKKIVKIQLRTDGSISNIVVRKNAADFTLSFRSEHIQKLLK

SEQ ID NO: 12 - protein, 1374 aa, Fusobacterium nucleatum
MKKQKFSDYYLGFDIGTNSVGWCVTDLDYNVLRFNKKDMWGSRLFDEAKTAAERRVQRNSRRRLKRRKWRLNLLEEIFSDEIMKIDSNFFRRLKESSLWLEDKNSKEKFTLFNDDNYKDYDFYKQYPTIFHLRDELIKNPEKKDIRLIYLALHSIFKSRGHFLFEGQNLKEIKNFETLYNNLISFLEDNGINKSIDKDNIEKLEKIICDSGKGLKDKEKEFKGIFNSDKQLVAIFKLSVGSSVSLNDLFDTDEYKKEEVEKEKISFREQIYEDDKPIYYSILGEKIELLDIAKSFYDFMVLNNILSDSNYISEAKVKLYEEHKKDLKNLKYIIRKYNKENYDKLFKDKNENNYPAYIGLNKEKDKKEVVEKSRLKIDDLIKVIKGYLPKPERIEEKDKTIFNEILNKIELKTILPKQRISDNGTLPYQIHEVELEKILENQSKYYDFLNYEENGVSTKDKLLKTFKFRIPYYVGPLNSYHKDKGGNSWIVRKEEGKILPWNFEQKVDIEKSAEEFIKRMTNKCTYLNGEDVIPKDSFLYSEYIILNELNKVQVNDEFLNEENKRKIIDELFKENKKVSEKKFKEYLLVNQIANRTVELKGIKDSFNSNYVSYIKFKDIFGEKLNLDIYKEISEKSILWKCLYGDDKKIFEKKIKNEYGDILNKDEIKKINSFKFNTWGRLSEKLLTGIEFINLETGECYSSVMEALRRTNYNLMELLSSKFTLQESIDNENKEMNEVSYRDLIEESYVSPSLKRAILQTLKIYEEIKKITGRVPKKVFIEMARGGDESMKNKKIPARQEQLKKLYDSCGNDIANFSIDIKEMKNSLSSYDNNSLRQKKLYLYYLQFGKCMYTGREIDLDRLLQNNDTYDIDHIYPRSKVIKDDSFDNLVLVLKNENAEKSNEYPVKKEIQEKMKSFWRFLKEKNFISDEKYKRLTGKDDFELRGFMARQLVNVRQTTKEVGKILQQIEPEIKIVYSKAEIASSFREMFDFIKVRELNDTHHAKDAYLNIVAGNVYNTKFTEKPYRYLQEIKENYDVKKIYNYDIKNAWDKENSLEIVKKNMEKNTVNITRFIKEEKGELFNLNPIKKGETSNEIISIKPKLYDGKDNKLNEKYGYYTSLKAAYFIYVEHEKKNKKVKTFERITRIDSTLIKNEKNLIKYLVSQKKLLNPKIIKKIYKEQTLIIDSYPYTFTGVDSNKKVELKNKKQLYLEKKYEQILKNALKFVEDNQGETEENYKFIYLKKRNNNEKNETIDAVKERYNIEFNEMYDKFLEKLSSKDYKNYINNKLYTNFLNSKEKFKKLKLWEKSLILREFLKIFNKNTYGKYEIKDSQTKEKLFSFPEDTGRIRLGQSSLGNNKELLEESVTGLFVKKIKL

SEQ ID NO: 13 - protein, 1084 aa, Corynebacterium diphtheriae
MKYHVGIDVGTFSVGLAAIEVDDAGMPIKTLSLVSHIHDSGLDPDEIKSAVTRLASSGIARRTRRLYRRKRRRLQQLDKFIQRQGWPVIELEDYSDPLYPWKVRAELAASYIADEKERGEKLSVALRHIARHRGWRNPYAKVSSLYLPDGPSDAFKAIREEIKRASGQPVPETATVGQMVTLCELGTLKLRGEGGVLSARLQQSDYAREIQEICRMQEIGQELYRKIIDVVFAAESPKGSASSRVGKDPLQPGKNRALKASDAFQRYRIAALIGNLRVRVDGEKRILSVEEKNLVFDHLVNLTPKKEPEWVTIAEILGIDRGQLIGTATMTDDGERAGARPPTHDTNRSIVNSRIAPLVDWWKTASALEQHAMVKALSNAEVDDFDSPEGAKVQAFFADLDDDVHAKLDSLHLPVGRAAYSEDTLVRLTRRMLSDGVDLYTARLQEFGIEPSWTPPTPRIGEPVGNPAVDRVLKTVSRWLESATKTWGAPERVIIEHVREGFVTEKRAREMDGDMRRRAARNAKLFQEMQEKLNVQGKPSRADLWRYQSVQRQNCQCAYCGSPITFSNSEMDHIVPRAGQGSTNTRENLVAVCHRCNQSKGNTPFAIWAKNTSIEGVSVKEAVERTRHWVTDTGMRSTDFKKFTKAVVERFQRATMDEEIDARSMESVAWMANELRSRVAQHFASHGTTVRVYRGSLTAEARRASGISGKLKFFDGVGKSRLDRRHHAIDAAVIAFTSDYVAETLAVRSNLKQSQAHRQEAPQWREFTGKDAEHRAAWRVWCQKMEKLSALLTEDLRDDRVVVMSNVRLRLGNGSAHKETIGKLSKVKLSSQLSVSDIDKASSEALWCALTREPGFDPKEGLPANPERHIRVNGTHVYAGDNIGLFPVSAGSIALRGGYAELGSSFHHARVYKITSGKKPAFAMLRVYTIDLLPYRNQDLFSVELKPQTMSMRQAEKKLRDALATGNAEYLGWLVVDDELVVDTSKIATDQVKAVEAELGTIRRWRVDGFFSPSKLRLRPLQMSKEGIKKESAPELSKIIDRPGWLPAVNKLFSDGNVTVVRRDSLGRVRLESTAHLPVTWKVQ

SEQ ID NO: 14 - protein, 1395 aa, Treponema denticola
MKKEIKDYFLGLDVGTGSVGWAVTDTDYKLLKANRKDLWGMRCFETAETAEVRRLHRGARRRIERRKKRIKLLQELFSQEIAKTDEGFFQRMKESPFYAEDKTILQENTLFNDKDFADKTYHKAYPTINHLIKAWIENKVKPDPRLLYLACHNIIKKRGHFLFEGDFDSENQFDTSIQALFEYLREDMEVDIDADSQKVKEILKDSSLKNSEKQSRLNKILGLKPSDKQKKAITNLISGNKINFADLYDNPDLKDAEKNSISFSKDDFDALSDDLASILGDSFELLLKAKAVYNCSVLSKVIGDEQYLSFAKVKIYEKHKTDLTKLKNVIKKHFPKDYKKVFGYNKNEKNNNNYSGYVGVCKTKSKKLIINNSVNQEDFYKFLKTILSAKSEIKEVNDILTEIETGTFLPKQISKSNAEIPYQLRKMELEKILSNAEKHFSFLKQKDEKGLSHSEKIIMLLTFKIPYYIGPINDNHKKFFPDRCWVVKKEKSPSGKTTPWNFFDHIDKEKTAEAFITSRTNFCTYLVGESVLPKSSLLYSEYTVLNEINNLQIIIDGKNICDIKLKQKIYEDLFKKYKKITQKQISTFIKHEGICNKTDEVIILGIDKECTSSLKSYIELKNIFGKQVDEISTKNMLEEIIRWATIYDEGEGKTILKTKIKAEYGKYCSDEQIKKILNLKFSGWGRLSRKFLETVTSEMPGFSEPVNIITAMRETQNNLMELLSSEFTFTENIKKINSGFEDAEKQFSYDGLVKPLFLSPSVKKMLWQTLKLVKEISHITQAPPKKIFIEMAKGAELEPARTKTRLKILQDLYNNCKNDADAFSSEIKDLSGKIENEDNLRLRSDKLYLYYTQLGKCMYCGKPIEIGHVFDTSNYDIDHIYPQSKIKDDSISNRVLVCSSCNKNKEDKYPLKSEIQSKQRGFWNFLQRNNFISLEKLNRLTRATPISDDETAKFIARQLVETRQATKVAAKVLEKMFPETKIVYSKAETVSMFRNKFDIVKCREINDFHHAHDAYLNIVVGNVYNTKFTNNPWNFIKEKRDNPKIADTYNYYKVFDYDVKRNNITAWEKGKTIITVKDMLKRNTPIYTRQAACKKGELFNQTIMKKGLGQHPLKKEGPFSNISKYGGYNKVSAAYYTLIEYEEKGNKIRSLETIPLYLVKDIQKDQDVLKSYLTDLLGKKEFKILVPKIKINSLLKINGFPCHITGKTNDSFLLRPAVQFCCSNNEVLYFKKIIRFSEIRSQREKIGKTISPYEDLSFRSYIKENLWKKTKNDEIGEKEFYDLLQKKNLEIYDMLLTKHKDTIYKKRPNSATIDILVKGKEKFKSLIIENQFEVILEILKLFSATRNVSDLQHIGGSKYSGVAKIGNKISSLDNCILIYQSITGIFEKRIDLLKV

SEQ ID NO: 15 - protein, 1334 aa, Listeria monocytogenes
MKNPYTIGLDIGTNSVGWAVLTNQYDLVKRKMKVAGNSDKKQIKKNFWGVRLFDDGQTAVDRRMNRTARRRIERRRNRISYLQEIFAVEMANIDANFFCRLNDSFYVDSEKRNSRHPFFATIEEEVAYHDNYRTIYHLREKLVNSSEKADLRLVYLALAHIIKYRGNFLIEGALDTKNTSVDEVYKQFIETYNQVFMSNIEEGALAKVEENIEVANILAGKFTRREKFERILQLYPGEKSTGMFAQFISLIVGSKGNFQKVFDLIEKTDIECAKDSYEEDLETLLAIIGDEYAELFVAAKNTYNAVVLSSIITVTDTETNAKLSASMIERFDAHEKDLVELKAFIKLNLPKQYEEIFSNAAIDGYAGYIDGKTKQVDFYKYLKTILENIEGSDYFIAKIEEENFLRKQRTFDNGAIPHQLHLEELEAIIHQQAKYYPFLKEDYDKIKSLVTFRIPYFVGPLANGQSEFAWLTRKADGEIRPWNIEEKVDFGKSAVDFIEKMTNKDTYLPKENVLPKHSLCYQKYMVYNELTKIRYIDDQGKTNYFSGREKQQVFNDLFKQKRKVKKKDLELFLRNINHIESPTIEGLEDSFNASYATYHDLLKVGMKQEILDNPLNTEMLEDIVKILTVFEDKPMIKEQLQQFSDVLDGGVLKKLERRHYTGWGRLSAKLLVGIREKQSHLTILDYLMNDDGLNRNLMQLINDSNLSFKSIIEKEQVSTTDKDLQSIVAELAGSPAIKKGILQSLKIVDELVSIMGYPPQTIVVEMARENQTTGKGKNNSKPRYKSLEKAIKEFGSQILKEHPTDNQELKNNRLYLYYLQNGKDMYTGQELDIHNLSNYDIDHIVPQSFITDNSIDNLVLTSSAGNREKGGDVPPLEIVRKRKVFWEKLYQGNLMSKRKFDYLTKAERGGLTEADKARFIHRQLVETRQITKNVANILYQRFNKETDNHGNTMEQVRIVTLKSALVSQFRKQFQLYKVREVNGYHHAHDAYLNGVVANTLLKVYPQLEPEFVYGEYHQFDWFKANKATAKKQFYTNIMLFFAQKERIIDENGEILWDKKYLETIKKVLDYRQMNIVKKTEIQKGEFSKATIKPKGNSSKLIPRKENWDPMKYGGLDSPNMAYAVIIEHAKGKKKIVIEKKLIQINIMERKMFEKDEEAFLEEKGYRHPKVLTKLPKYTLYECEKGRRRMLASANEAQKGNQLVLSNHLVSLLYHAKNCEASDGKSLKYIEAHRETFSELLAQVSEFATRYTLADANLSKINNLFEQNKEGDIKAIAQSFVDLMAFNAMGAPASFKFFEATIDRKRYTNLKELLSSTIIYQSITGLYESRKRLDD

SEQ ID NO: 16 - protein, 1236 aa, Mycoplasma mobile
MYFYKNKENKLNKKVVLGLDLGIASVGWCLTDISQKEDNKFPIILHGVRLFETVDDSDDKLLNETRRKKRGQRRRNRRLFTRKRDFIKYLIDNNIIELEFDKNPKILVRNFIEKYINPFSKNLELKYKSVTNLPIGFHNLRKAAINEKYKLDKSELIVLLYFYLSLRGAFFDNPEDTKSKEMNKNEIEIFDKNESIKNAEFPIDKIIEFYKISGKIRSTINLKFGHQDYLKEIKQVFEKQNIDFMNYEKFAMEEKSFFSRIRNYSEGPGNEKSFSKYGLYANENGNPELIINEKGQKIYTKIFKTLWESKIGKCSYDKKLYRAPKNSFSAKVFDITNKLTDWKHKNEYISERLKRKILLSRFLNKDSKSAVEKILKEENIKFENLSEIAYNKDDNKINLPIINAYHSLTTIFKKHLINFENYLISNENDLSKLMSFYKQQSEKLFVPNEKGSYEINQNNNVLHIFDAISNILNKFSTIQDRIRILEGYFEFSNLKKDVKSSEIYSEIAKLREFSGTSSLSFGAYYKFIPNLISEGSKNYSTISYEEKALQNQKNNFSHSNLFEKTWVEDLIASPTVKRSLRQTMNLLKEIFKYSEKNNLEIEKIVVEVTRSSNNKHERKKIEGINKYRKEKYEELKKVYDLPNENTTLLKKLWLLRQQQGYDAYSLRKIEANDVINKPWNYDIDHIVPRSISFDDSFSNLVIVNKLDNAKKSNDLSAKQFIEKIYGIEKLKEAKENWGNWYLRNANGKAFNDKGKFIKLYTIDNLDEFDNSDFINRNLSDTSYITNALVNHLTFSNSKYKYSVVSVNGKQTSNLRNQIAFVGIKNNKETEREWKRPEGFKSINSNDFLIREEGKNDVKDDVLIKDRSFNGHHAEDAYFITIISQYFRSFKRIERLNVNYRKETRELDDLEKNNIKFKEKASFDNFLLINALDELNEKLNQMRFSRMVITKKNTQLFNETLYSGKYDKGKNTIKKVEKLNLLDNRTDKIKKIEEFFDEDKLKENELTKLHIFNHDKNLYETLKIIWNEVKIEIKNKNLNEKNYFKYFVNKKLQEGKISFNEWVPILDNDFKIIRKIRYIKFSSEEKETDEIIFSQSNFLKIDQRQNFSFHNTLYWVQIWVYKNQKDQYCFISIDARNSKFEKDEIKINYEKLKTQKEKLQIINEEPILKINKGDLFENEEKELFYIVGRDEKPQKLEIKYILGKKIKDQKQIQKPVKKYFPNWKKVNLTYMGEIFKK

SEQ ID NO: 17 - protein, 1372 aa, Legionella pneumophila
MESSQILSPIGIDLGGKFTGVCLSHLEAFAELPNHANTKYSVILIDHNNFQLSQAQRRATRHRVRNKKRNQFVKRVALQLFQHILSRDLNAKEETALCHYLNNRGYTYVDTDLDEYIKDETTINLLKELLPSESEHNFIDWFLQKMQSSEFRKILVSKVEEKKDDKELKNAVKNIKNFITGFEKNSVEGHRHRKVYFENIKSDITKDNQLDSIKKKIPSVCLSNLLGHLSNLQWKNLHRYLAKNPKQFDEQTFGNEFLRMLKNFRHLKGSQESLAVRNLIQQLEQSQDYISILEKTPPEITIPPYEARTNTGMEKDQSLLLNPEKLNNLYPNWRNLIPGIIDAHPFLEKDLEHTKLRDRKRIISPSKQDEKRDSYILQRYLDLNKKIDKFKIKKQLSFLGQGKQLPANLIETQKEMETHFNSSLVSVLIQIASAYNKEREDAAQGIWFDNAFSLCELSNINPPRKQKILPLLVGAILSEDFINNKDKWAKFKIFWNTHKIGRTSLKSKCKEIEEARKNSGNAFKIDYEEALNHPEHSNNKALIKIIQTIPDIIQAIQSHLGHNDSQALIYHNPFSLSQLYTILETKRDGFHKNCVAVTCENYWRSQKTEIDPEISYASRLPADSVRPFDGVLARMMQRLAYEIAMAKWEQIKHIPDNSSLLIPIYLEQNRFEFEESFKKIKGSSSDKTLEQAIEKQNIQWEEKFQRIINASMNICPYKGASIGGQGEIDHIYPRSLSKKHFGVIFNSEVNLIYCSSQGNREKKEEHYLLEHLSPLYLKHQFGTDNVSDIKNFISQNVANIKKYISFHLLTPEQQKAARHALFLDYDDEAFKTITKFLMSQQKARVNGTQKFLGKQIMEFLSTLADSKQLQLEFSIKQITAEEVHDHRELLSKQEPKLVKSRQQSFPSHAIDATLTMSIGLKEFPQFSQELDNSWFINHLMPDEVHLNPVRSKEKYNKPNISSTPLFKDSLYAERFIPVWVKGETFAIGFSEKDLFEIKPSNKEKLFTLLKTYSTKNPGESLQELQAKSKAKWLYFPINKTLALEFLHHYFHKEIVTPDDTTVCHFINSLRYYTKKESITVKILKEPMPVLSVKFESSKKNVLGSFKHTIALPATKDWERLFNHPNFLALKANPAPNPKEFNEFIRKYFLSDNNPNSDIPNNGHNIKPQKHKAVRKVFSLPVIPGNAGTMMRIRRKDNKGQPLYQLQTIDDTPSMGIQINEDRLVKQEVLMDAYKTRNLSTIDGINNSEGQAYATFDNWLTLPVSTFKPEIIKLEMKPHSKTRRYIRITQSLADFIKTIDEALMIKPSDSIDDPLNMPNEIVCKNKLFGNELKPRDGKMKIVSTGKIVTYEFESDSTPQWIQTLYVTQLKKQP

SEQ ID NO: 18 - protein, 1122 aa, Streptococcus thermophilus
MSDLVLGLDIGIGSVGVGILNKVTGEIIHKNSRIFPAAQAENNLVRRTNRQGRRLTRRKKHRIVRLNRLFEESGLITDFTKISINLNPYQLRVKGLTDELSNEELFIALKNMVKHRGISYLDDASDDGNSSVGDYAQIVKENSKQLETKTPGQIQLERYQTYGQLRGDFTVEKDGKKHRLINVFPTSAYRSEALRILQTQQEFNSQITDEFINRYLEILTGKRKYYHGPGNEKSRTDYGRYRTNGETLDNIFGILIGKCTFYPDEFRAAKASYTAQEFNLLNDLNNLTVPTETKKLSKEQKNQIINYVKNEKVMGPAKLFKYIAKLLSCDVADIKGHRIDKSGKAEIHTFEAYRKMKTLETLDIEQMDRETLDKLAYVLTLNTEREGIQEALEHEFADGSFSQKQVDELVQFRKANSSIFGKGWHNFSVKLMMELIPELYETSEEQMTILTRLGKQKTTSSSNKTKYIDEKLLTEEIYNPVVAKSVRQAIKIVNAAIKEYGDFDNIVIEMARETNEDDEKKAIQKIQKANKDEKDAAMLKAANQYNGKAELPHSVFHGHKQLATKIRLWHQQGERCLYTGKTISIHDLINNPNQFEVDHILPLSITFDDSLANKVLVYATANQEKGQRTPYQALDSMDDAWSFRELKAFVRESKTLSNKKKEYLLTEEDISKFDVRKKFIERNLVDTRYASRVVLNALQEHFRAHKIDTKVSVVRGQFTSQLRRHWGIEKTRDTYHHHAVDALIIAASSQLNLWKKQKNTLVSYSEEQLLDIETGELISDDEYKESVFKAPYQHFVDTLKSKEFEDSILFSYQVDSKFNRKISDATIYATRQAKVGKDKKDETYVLGKIKDIYTQDGYDAFMKIYKKDKSKFLMYRHDPQTFEKVIEPILENYPNKEMNEKGKEVPCNPFLKYKEEHGYIRKYSKKGNGPEIKSLKYYDSKLLGNPIDITPENSKNKVVLQSLKPWRTDVYFNKNTGKYEILGLKYADLQFEKKTGTYKISQEKYNGIMKEEGVDSDSEFKFTLYKNDLLLVKDTETKEQQLFRFLSRTMPNVKYYVELKPYSKDKFEKNESLIEILGSADKSGRCIKGLGKSNISIYKVRTDVLGNQHIIKNEGDKPKLDF

SEQ ID NO: 19 - protein, 1128 aa, Streptococcus thermophilus
MSDLVLGLDIGIGSVGVGILNKVTGEIIHKNSRIFPAAQAENNLVRRTNRQGRRLTRRKKHRIVRLNRLFEESGLITDFTKISINLNPYQLRVKGLTDELSNEELFIALKNMVKHRGISYLDDASDDGNSSVGDYAQIVKENSKQLETKTPGQIQLERYQTYGQLRGDFTVEKDGKKHRLINVFPTSAYRSEALRILQTQQEFNPQITDEFINRYLEILTGKRKYYHGPGNEKSRTDYGRYRTSGETLDNIFGILIGKCTFYPEEFRAAKASYTAQEFNLLNDLNNLTVPTETKKLSKEQKNQIINYVKNEKAMGPAKLFKYIAKLLSCDVADIKGYRIDKSGKAEIHTFEAYRKMKTLETLDIEQMDRETLDKLAYVLTLNTEREGIQEALEHEFADGSFSQKQVDELVQFRKANSSIFGKGWHNFSVKLMMELIPELYETSEEQMTILTRLGKQKRLRLQIKQNISNKTKYIDEKLLTEEIYNPVVAKSVRQAIKIVNAAIKEYGDFDNIVIEMARETNEDDEKKAIQKIQKANKDEKDAAMLKAANQYNGKAELPHSVFHGHKQLATKIRLWHQQGERCLYTGKTISIHDLINNPNQFEVDHILPLSITFDDSLANKVLVYATANQEKGQRTPYQALDSMDDAWSFRELKAFVRESKTLSNKKKEYLLTEEDISKFDVRKKFIERNLVDTRYASRVVLNALQEHFRAHKIDTKVSVVRGQFTSQLRRHWGIEKTRDTYHHHAVDALIIAASSQLNLWKKQKNTLVSYSEEQLLDIETGELISDDEYKESVFKAPYQHFVDTLKSKEFEDSILFSYQVDSKFNRKISDATIYATRQAKVGKDKKDETYVLGKIKDIYTQDGYDAFMKIYKKDKSKFLMYRHDPQTFEKVIEPILENYPNKQMNEKGKEVPCNPFLKYKEEHGYIRKYSKKGNGPEIKSLKYYDSKLLGNPIDITPENSKNKVVLQSLKPWRTDVYFNKATGKYEILGLKYADLQFEKGTGTYKISQEKYNDIKKKEGVDSDSEFKFTLYKNDLLLVKDTETKEQQLFRFLSRTLPKQKHYVELKPYDKQKFEGGEALIKVLGNVANGGQCIKGLAKSNISIYKVRTDVLGNQHIIKNEGDKPKLDF

SEQ ID NO: 20 - protein, 1123 aa, Francisella tularensis
MNVKILPIAIDLDVKNTGVFSAFYQKGTSLEKLDNKNGKVYELSKDSYTLLMNNRTARRHKRRGIDRKQLVKRLFKLVWTEQLNLEWDKDTQQAISFLFNRRGFSFITDGYSTEYLNIVPEQVKAILMDIFDDYNGEDDLDSYLKLATEQESKISEIYNKLMQKILEFKLRKLCTDIKDDKVSTKTLKEITSYEFELLADYLANYSESLKTQKFSYTDKQGNLKELSYYHHDKYNIQEFLKRHATINDEILGTLLTDDFDIWNFNFEKFDFDKNEEKLQNQEDKDHTQAHLHHFVFVVNKIKSEMASGGRHRSQYFQEITNVLDENNHQEGYLKNFCENLHNKKYSNLSVKNLVNLVGNLSNLELKPLRKYFNDKIHAKADHWDEQKFTETYCHWILGEWRVGVKDQDKKDGAKYSYKDLCNELKQKVTKAGLIDFLLELDPCRTIPPYLDNNNRKPPKCQSLILNPKFLDNQYPNWQQYLQELKKLQSIQDYLDSFETDLKDLKSSKDQPYFVEYKSSNQQMASGQRDYKDLDARILQFIFDRVKASDELLLNEIYFQAKKLKQKASSELEKLESSKKLDEVIANSQLSQILKSQHTNGIFEQGTFLHLVCKYYKQRQRARDSRLYIMPEYRYDKKLDKYNNTGRFDDNNQLLTYCNHKPRQKRYQLLNDLAGVLQVSRNQLLSSVEEWFQQAQRVGEISKSQDEQIFEWLKSFKIASYCKAAVEMQKQYRGTLKNAIQTAIFRQSENINKNKNTGNQQQALSENSKDVKSLTADEKKLLKLIENIAKASQKIGESLGLNDKQIKKFNSIYSFAQIQQIAFAKRKGNANTCAVCSADNAHRMQQIKITELVEDNKDNIILSAKAQRLPAIPTRIVDGAVKKMATILAKNIVDDNWQNIKQVLSAKHQLHIPIITESNAFEFEPALADVKGKSLKDRRKKALERISPENIFKDKNNRIKEFAKGISAYSGANLTDGDFDGAKEELDHIIPRSHKKYGTLNDEANLICVTRDDNKNIFAIDTSKWFEIETPSDLRDIGVATIQYKIDNNSRPKVRVKLDYVIDDDSKINYFMNHSLLKSRYPDKVLEILKQSTIIEFESSGFNKTIKEMLGMTLAGIYNETSNN

SEQ ID NO: 21 - protein, 1436 aa, Bacteroides fragilis
MKRILGLDLGTNSIGWALVNEAENKDERSSIVKLGVRVNPLTVDELTNFEKGKSITTNADRTLKRGMRRNLQRYKLRRETLTEVLKEHKLITEDTILSENGNRTTFETYRLRAKAVTEEISLEEFARVLLMINKKRGYKSSRKAKGVEEGTLIDGMDIARELYNNNLTPGELCLQLLDAGKKFLPDFYRSDLQNELDRIWEKQKEYYPEILTDVLKEELRGKKRDAVWAICAKYFVWKENYTEWNKEKGKTEQQEREHKLEGIYSKRKRDEAKRENLQWRVNGLKEKLSLEQLVIVFQEMNTQINNSSGYLGAISDRSKELYFNKQTVGQYQMEMLDKNPNASLRNMVFYRQDYLDEFNMLWEKQAVYHKELTEELKKEIRDIIIFYQRRLKSQKGLIGFCEFESRQIEVDIDGKKKIKTVGNRVISRSSPLFQEFKIWQILNNIEVTVVGKKRKRRKLKENYSALFEELNDAEQLELNGSRRLCQEEKELLAQELFIRDKMTKSEVLKLLFDNPQELDLNFKTIDGNKTGYALFQAYSKMIEMSGHEPVDFKKPVEKVVEYIKAVFDLLNWNTDILGFNSNEELDNQPYYKLWHLLYSFEGDNTPTGNGRLIQKMTELYGFEKEYATILANVSFQDDYGSLSAKAIHKILPHLKEGNRYDVACVYAGYRHSESSLTREEIANKVLKDRLMLLPKNSLHNPVVEKILNQMVNVINVIIDIYGKPDEIRVELARELKKNAKEREELTKSIAQTTKAHEEYKTLLQTEFGLTNVSRTDILRYKLYKELESCGYKTLYSNTYISREKLFSKEFDIEHIIPQARLFDDSFSNKTLEARSVNIEKGNKTAYDFVKEKFGESGADNSLEHYLNNIEDLFKSGKISKTKYNKLKMAEQDIPDGFIERDLRNTQYIAKKALSMLNEISHRVVATSGSVTDKLREDWQLIDVMKELNWEKYKALGLVEYFEDRDGRQIGRIKDWTKRNDHRHHAMDALTVAFTKDVFIQYFNNKNASLDPNANEHAIKNKYFQNGRAIAPMPLREFRAEAKKHLENTLISIKAKNKVITGNINKTRKKGGVNKNMQQTPRGQLHLETIYGSGKQYLTKEEKVNASFDMRKIGTVSKSAYRDALLKRLYENDNDPKKAFAGKNSLDKQPIWLDKEQMRKVPEKVKIVTLEAIYTIRKEISPDLKVDKVIDVGVRKILIDRLNEYGNDAKKAFSNLDKNPIWLNKEKGISIKRVTISGISNAQSLHVKKDKDGKPILDENGRNIPVDFVNTGNNHHVAVYYRPVIDKRGQLVVDEAGNPKYELEEVVVSFFEAVTRANLGLPIIDKDYKTTEGWQFLFSMKQNEYFVFPNEKTGFNPKEIDLLDVENYGLISPNLFRVQKFSLKNYVFRHHLETTIKDTSSILRGITWIDFRSSKGLDTIVKVRVNHIGQIVSVGEY

SEQ ID NO: 22 - protein, 1314 aa, Mycoplasma synoviae
MLRLYCANNLVLNNVQNLWKYLLLLIFDKKIIFLFKIKVILIRRYMENNNKEKIVIGFDLGVASVGWSIVNAETKEVIDLGVRLFSEPEKADYRRAKRTTRRLLRRKKFKREKFHKLILKNAEIFGLQSRNEILNVYKDQSSKYRNILKLKINALKEEIKPSELVWILRDYLQNRGYFYKNEKLTDEFVSNSFPSKKLHEHYEKYGFFRGSVKLDNKLDNKKDKAKEKDEEEESDAKKESEELIFSNKQWINEIVKVFENQSYLTESFKEEYLKLFNYVRPFNKGPGSKNSRTAYGVFSTDIDPETNKFKDYSNIWDKTIGKCSLFEEEIRAPKNLPSALIFNLQNEICTIKNEFTEFKNWWLNAEQKSEILKFVFTELFNWKDKKYSDKKFNKNLQDKIKKYLLNFALENFNLNEEILKNRDLENDTVLGLKGVKYYEKSNATADAALEFSSLKPLYVFIKFLKEKKLDLNYLLGLENTEILYFLDSIYLAISYSSDLKERNEWFKKLLKELYPKIKNNNLEIIENVEDIFEITDQEKFESFSKTHSLSREAFNHIIPLLLSNNEGKNYESLKHSNEELKKRTEKAELKAQQNQKYLKDNFLKEALVPLSVKTSVLQAIKIFNQIIKNFGKKYEISQVVIEMARELTKPNLEKLLNNATNSNIKILKEKLDQTEKFDDFTKKKFIDKIENSVVFRNKLFLWFEQDRKDPYTQLDIKINEIEDETEIDHVIPYSKSADDSWFNKLLVKKSTNQLKKNKTVWEYYQNESDPEAKWNKFVAWAKRIYLVQKSDKESKDNSEKNSIFKNKKPNLKFKNITKKLFDPYKDLGFLARNLNDTRYATKVFRDQLNNYSKHHSKDDENKLFKVVCMNGSITSFLRKSMWRKNEEQVYRFNFWKKDRDQFFHHAVDASIIAIFSLLTKTLYNKLRVYESYDVQRREDGVYLINKETGEVKKADKDYWKDQHNFLKIRENAIEIKNVLNNVDFQNQVRYSRKANTKLNTQLFNETLYGVKEFENNFYKLEKVNLFSRKDLRKFILEDLNEESEKNKKNENGSRKRILTEKYIVDEILQILENEEFKDSKSDINALNKYMDSLPSKFSEFFSQDFINKCKKENSLILTFDAIKHNDPKKVIKIKNLKFFREDATLKNKQAVHKDSKNQIKSFYESYKCVGFIWLKNKNDLEESIFVPINSRVIHFGDKDKDIFDFDSYNKEKLLNEINLKRPENKKFNSINEIEFVKFVKPGALLLNFENQQIYYISTLESSSLRAKIKLLNKMDKGKAVSMKKITNPDEYKIIEHVNPLGINLNWTKKLENNN

SEQ ID NO: 23 - protein, 1368 aa, Streptococcus pyogenes
MDKKYSIGLDIGTNSVGWAVITDDYKVPSKKFKVLGNTDRHSIKKNLIGALLFDSGETAEATRLKRTARRRYTRRKNRICYLQEIFSNEMAKVDDSFFHRLEESFLVEEDKKHERHPIFGNIVDEVAYHEKYPTIYHLRKKLVDSTDKADLRLIYLALAHMIKFRGHFLIEGDLNPDNSDVDKLFIQLVQTYNQLFEENPINASGVDAKAILSARLSKSRRLENLIAQLPGEKKNGLFGNLIALSLGLTPNFKSNFDLAEDAKLQLSKDTYDDDLDNLLAQIGDQYADLFLAAKNLSDAILLSDILRLNSEITKAPLSASMIKRYDEHHQDLTLLKALVRQQLPEKYKEIFFDQSKNGYAGYIDGGASQEEFYKFIKPILEKMDGTEELLAKLNREDLLRKQRTFDNGSIPHQIHLGELHAILRRQEDFYPFLKDNREKIEKILTFRIPYYVGPLARGNSRFAWMTRKSEETITPWNFEEVVDKGASAQSFIERMTNFDKNLPNEKVLPKHSLLYEYFTVYNELTKVKYVTEGMRKPAFLSGEQKKAIVDLLFKTNRKVTVKQLKEDYFKKIECFDSVEISGVEDRFNASLGTYHDLLKIIKDKDFLDNEENEDILEDIVLTLTLFEDREMIEERLKTYAHLFDDKVMKQLKRRRYTGWGRLSRKLINGIRDKQSGKTILDFLKSDGFANRNFMQLIHDDSLTFKEDIQKAQVSGQGDSLHEHIANLAGSPAIKKGILQTVKVVDELVKVMGRHKPENIVIEMARENQTTQKGQKNSRERMKRIEEGIKELGSQILKEHPVENTQLQNEKLYLYYLQNGRDMYVDQELDINRLSDYDVDHIVPQSFIKDDSIDNKVLTRSDKNRGKSNNVPSEEVVKKMKNYWRQLLNAKLITQRKFDNLTKAERGGLSELDKAGFIKRQLVETRQITKHVAQILDSRMNTKYDENDKLIREVKVITLKSKLVSDFRKDFQFYKVREINNYHHAHDAYLNAVVGTALIKKYPKLESEFVYGDYKVYDVRKMIAKSEQEIGKATAKYFFYSNIMNFFKTEITLANGEIRKRPLIETNGETGEIVWDKGRDFATVRKVLSMPQVNIVKKTEVQTGGFSKESILPKRNSDKLIARKKDWDPKKYGGFDSPTVAYSVLVVAKVEKGKSKKLKSVKELLGITIMERSSFEKNPIDFLEAKGYKEVRKDLIVKLPKYSLFELENGRKRMLASAGELQKGNELALPSKYVNFLYLASHYEKLKGSPEDNEQKQLFVEQHKHYLDEIIEQISEFSKRVILADANLDKVLSAYNKHRDKPIREQAENIIHLFTLTNLGAPAAFKYFDTTIDRKRYTSTKEVLDATFIHQSITGLYETRIDLSQLGGD

SEQ ID NO: 24 - protein, 1368 aa, Streptococcus pyogenes
MDKKYSIGLDIGTNSVGWAVITDDYKVPSKKFKVLGNTDRHSIKKNLIGALLFDSGETAEATRLKRTARRRYTRRKNRICYLQEIFSNEMAKVDDSFFHRLEESFLVEEDKKHERHPIFGNIVDEVAYHEKYPTIYHLRKKLVDSTDKADLRLIYLALAHMIKFRGHFLIEGDLNPDNSDVDKLFIQLVQTYNQLFEENPINASGVDAKAILSARLSKSRRLENLIAQLPGEKKNGLFGNLIALSLGLTPNFKSNFDLAEDAKLQLSKDTYDDDLDNLLAQIGDQYADLFLAAKNLSDAILLSDILRVNTEITKAPLSASMIKRYDEHHQDLTLLKALVRQQLPEKYKEIFFDQSKNGYAGYIDGGASQEEFYKFIKPILEKMDGTEELLVKLNREDLLRKQRTFDNGSIPHQIHLGELHAILRRQEDFYPFLKDNREKIEKILTFRIPYYVGPLARGNSRFAWMTRKSEETITPWNFEEVVDKGASAQSFIERMTNFDKNLPNEKVLPKHSLLYEYFTVYNELTKVKYVTEGMRKPAFLSGEQKKAIVDLLFKTNRKVTVKQLKEDYFKKIECFDSVEISGVEDRFNASLGTYHDLLKIIKDKDFLDNEENEDILEDIVLTLTLFEDREMIEERLKTYAHLFDDKVMKQLKRRRYTGWGRLSRKLINGIRDKQSGKTILDFLKSDGFANRNFMQLIHDDSLTFKEDIQKAQVSGQGDSLHEHIANLAGSPAIKKGILQTVKVVDELVKVMGRHKPENIVIEMARENQTTQKGQKNSRERMKRIEEGIKELGSQILKEHPVENTQLQNEKLYLYYLQNGRDMYVDQELDINRLSDYDVDHIVPQSFLKDDSIDNKVLTRSDKNRGKSDNVPSEEVVKKMKNYWRQLLNAKLITQRKFDNLTKAERGGLSELDKAGFIKRQLVETRQITKHVAQILDSRMNTKYDENDKLIREVKVITLKSKLVSDFRKDFQFYKVREINNYHHAHDAYLNAVVGTALIKKYPKLESEFVYGDYKVYDVRKMIAKSEQEIGKATAKYFFYSNIMNFFKTEITLANGEIRKRPLIETNGETGEIVWDKGRDFATVRKVLSMPQVNIVKKTEVQTGGFSKESILPKRNSDKLIARKKDWDPKKYGGFDSPTVAYSVLVVAKVEKGKSKKLKSVKELLGITIMERSSFEKNPIDFLEAKGYKEVKKDLIIKLPKYSLFELENGRKRMLASAGELQKGNELALPSKYVNFLYLASHYEKLKGSPEDNEQKQLFVEQHKHYLDEIIEQISEFSKRVILADANLDKVLSAYNKHRDKPIREQAENIIHLFTLTNLGAPAAFKYFDTTIDRKRYTSTKEVLDATLIHQSITGLYETRIDLSQLGGD

SEQ ID NO: 25 - protein, 1370 aa, Streptococcus agalactiae; identical to SEQ ID NO: 5

SEQ ID NO: 26 - protein, 1173 aa, Rhodospirillum rubrum
MRPIEPWILGLDIGTDSLGWAVFSCEEKGPPTAKELLGGGVRLFDSGRDAKDHTSRQAERGAFRRARRQTRTWPWRRDRLIALFQAAGLTPPAAETRQIALALRREAVSRPLAPDALWAALLHLAHHRGFRSNRIDKRERAAAKALAKAKPAKATAKATAPAKEADDEAGFWEGAEAALRQRMAASGAPTVGALLADDLDRGQPVRMRYNQSDRDGVVAPTRALIAEELAEIVARQSSAYPGLDWPAVTRLVLDQRPLRSKGAGPCAFLPGEDRALRALPTVQDFIIRQTLANLRLPSTSADEPRPLTDEEHAKALALLSTARFVEWPALRRALGLKRGVKFTAETERNGAKQAARGTAGNLTEAILAPLIPGWSGWDLDRKDRVFSDLWAARQDRSALLALIGDPRGPTRVTEDETAEAVADAIQIVLPTGRASLSAKAARAIAQAMAPGIGYDEAVTLALGLHHSHRPRQERLARLPYYAAALPDVGLDGDPVGPPPAEDDGAAAEAYYGRIGNISVHIALNETRKIVNALLHRHGPILRLVMVETTRELKAGADERKRMIAEQAERERENAEIDVELRKSDRWMANARERRQRVRLARRQNNLCPYTSTPIGHADLLGDAYDIDHVIPLARGGRDSLDNMVLCQSDANKTKGDKTPWEAFHDKPGWIAQRDDFLARLDPQTAKALAWRFADDAGERVARKSAEDEDQGFLPRQLTDTGYIARVALRYLSLVTNEPNAVVATNGRLTGLLRLAWDITPGPAPRDLLPTPRDALRDDTAARRFLDGLTPPPLAKAVEGAVQARLAALGRSRVADAGLADALGLTLASLGGGGKNRADHRHHFIDAAMIAVTTRGLINQINQASGAGRILDLRKWPRTNFEPPYPTFRAEVMKQWDHIHPSIRPAHRDGGSLHAATVFGVRNRPDARVLVQRKPVEKLFLDANAKPLPADKIAEIIDGFASPRMAKRFKALLARYQAAHPEVPPALAALAVARDPAFGPRGMTANTVIAGRSDGDGEDAGLITPFRANPKAAVRTMGNAVYEVWEIQVKGRPRWTHRVLTRFDRTQPAPPPPPENARLVMRLRRGDLVYWPLESGDRLFLVKKMAVDGRLALWPARLATGKATALYAQLSCPNINLNGDQGYCVQSAEGIRKEKIRTTSCTALGRLRLSKKAT

SEQ ID NO: 27 - protein, 997 aa, Maritimibacter alkaliphilus
MKVLVDAGLMPSDPAAAKALETLDPYELRATGLDVMLPLTHLGRAVFHLNQRRGFKSNRKTDRGDNESGKIKDATKRLTWAMQEAGARTYGEFLHMRRARASDPRQVPSVRTRLSVASRGGPDSKEEAGYDFYPERAHLEDEFHALWSAQAAFHPDLTCELRDVVFEKIFYQRPLKEPKVGLCLFTAEERLPKAHPLTGRRVLYETVNQLRVTADGRTTRPLTLEERDMIVYALDNKKPVKSLSSMHLKLVALGKLVKLKDGERFTLESGVRDAIACDPIRATMGHPDGFGPAWSRLDWQAQWALIEKLRQVQSDDDFASLVAWLGATHNLSEDHAKRVANLHLPEGYGRLGLTATEAILCNLKAEVCTYSQAVERWGKHHSNQRTGECLEALPYYGEVLDRHVIPGTYNEDDDDVTRYGRITNPTVHIGLNQLRRLVNRIIATYGKPDQIVVELARELKQSEAQKSEALKKIRDTTADAIRRGRQLEEIGQKNTGANRLLLRLWEDLGPAVGPRCCPYTGKPISVTMLFDGACDVDHILPYSRTLDDSFANRTICLREANRQKGDRTPWEAWGGSDQWDAIEANLKDLPENKRKRFAPDAMERFEGERDFLDRALVDTQYLARISRAYLDTLFTEGGHVWVVPGRMTEMLRRHWGLNALLSDKDRGAGKVKNRTDHRHHAIDAAVIAATDHSLVNRISKAAGQGESAGQSAELIARDTPEPWEGFRNDISAQIARIVVSHRADHGRIDVEGRKHGKDSTAGRLHNDTAYGIVDDHTVVSRTPLLSLKPGDIEVTTKGKNIRDTQLQKALSVATTGKDGKGFEEALRNFAEKEGPYQGIRRVRLIETLQSSARVEVGSDEDGQPLKAYKGDSNHCYDLWKLPDGKVVPHVVSTYEAHAGTDKRPHPAAKRILRVFKKDMVAIEQDDQTAIFYVQKLDRANGLFLAPHLEANADARHRNPNDAFKFLQMGAGSVVRNKLRRVYVDEIGRIKDPGPPKH

SEQ ID NO: 28 - protein, 1027 aa, Blastopirellula marina
MFSESGDQPSLVDCGVRIFPEGVERDQQGGEKSKSQSRRVARGIRRQVRRRAQRLRHLKHALITTGLFPADVVDQQEVLASNPYELRSRALSEKLEPYEIGRILLHLAKRRGFLSNRTTDRSGGNELKGILAEMTQLQGEIAAHGCQTLGQYLHQLGDDGETFAQRLRGRHTLRAMYEDEFEKIWERQASYYPALLTEELRGGEEGKQSYPLVPTARRKSESLLKRFGLHGLLFFQRKMYWPKSVIGRCDLEPKEKRCPKADRLAQRFRILQEVNNLRLISPADRKEYTFAEFVGAGADKKLVDYLCEAKERTFPQIRKKFKLPETISFNYERGERSKLQGHETDAHFNGKKGLGKRRWSEIAEDVKDHIIQIVLEEDREDVALRKLTQDCSLTVEEAHKAMALHLPAGYSQYSRVAISRLLPHLELGKLLMGNDASDSAMHAAGYLRPDEREVRQYDLLPEPPDIPNPLVRQALYEVRKVINAIIREYGALGTIRVELAREAKKSAEQRTQIRIANAKRERENAAIAKTLQEMSPAIRPTRRNIQRYLLWKDQGGVCIYTGKVISQAQLFDSGEVDVDHILPRWRSLDDSMANKVIAHRSANNEKGDRTPWEWLGHDKPRFDELLLRAQRLPYGKRQRFIQKEVELTNFVERQLRDTTYVSRLVVQYLKGLGVPITTVKGPMTAELRHHWGLNALLNEDGSQKKNRSDHRHHAIDAIVIGLTDAKRLHALANARGKDLQPPWSEFRSDVATALGRMAVSHRVRRRIQGALHEETIYGPTQKAAQPTSTDQRPWAKDWIEDSQIVVRRKSVSDLTNTKHLAKIRDVTIRKILEDHLRRQKVDPTKPGVIPKDAFAGSNAPQMPSGVPIKKVRLVERGETWRKIGSGEASKFIKPGSNHHISYFAISRKGRESWKAHVTIMLDAACIAKESINNGKIVNRSIGDQGRFLMSLSIGEMFEITNNGGEILLCVVRKIDQSGRIYYKIHDDARESMDLKKDNLYMSPSKMQQFDARKVTVTPLGKIRNAND

SEQ ID NO: 29 - protein, 158 aa, Francisella tularensis
MIDFLLELDPCITIPPYLDNNNRKPPKCQSLILNPKFLDNQYPNWQQYLQELKKLQSIQDYLDSFETDLKDLKSSKDQPYFVEYKSSNQQMASGQRDYKDLDARILQFIFDRVKASDELLLSEIYFQAKKLKQKASSELEKLESSKKLDEVIANSQLS

SEQ ID NO: 30 - protein, 393 aa, Francisella tularensis
MNVKILPIAIDLDVKNTGVFSAFYQKGTSLEKLDNKNGKVYELSKDSYTLLMNNRTAQRHQRRGIDRKQLVKRLFKLVWTEQLNLEWDKDTQQAISFLFNRRGFSFITDGYSTEYLNIVPEQVKAILMDIFDDYNGEDDLDSYLKLATEQESKISEIYNKLMQKILEFKLRKLCTDIKDDKVSTKTLKEITSYEFELLADYLANYSESLKTQKFSYTDKQGNLKELSYYHHDKYNIQEFLKRHATINDEILDTLLTDDFDIWNFNFEKFDFDKNEEKLQSQEDKDHTQAYFHHFVFAVNKIKSEMASGGRHRSQYFQEITNVLDENNHQEGYLKNFCENLHNKKYSNLSVKNLVNLVGNLSNLELKPLRKYFNDKNLIIGMSKSLQKLIATGY

SEQ ID NO: 31 - protein, 1066 aa, Rhodopseudomonas palustris
MSERVVRRILGIDLGIASCGWGVVDISGAGGGIIATGVRCFDAPLIDKTGEPKSATRRTARGQRRIVRRRRQRMNGVRRLLCEFGLLPDPRPDALNQAMRRISTASAAAQVTPWTLRAAAHQRLLSNEELAVVLGHIARHRGFRSNAKNEAGANAADETSKMKKAMEATREGLAKYHAFGDMIANDPKFANRKRNRDKDYSHTAKRSDLEDEVRAILRAQLRFGSAAATETLAQTFADVAFFQRPLQDSEDRVGDCPFEPGQKRAARRAPSFELFRFLSRLANLKLAVGRSPERRLTAEEIALAAKGFGETKKTITFKSLREALDLDPNARFSGIGKDKEASLDVVARTGGAAYGTKTLKDALGDAPWRSLSRTPETLDRIAEILSFREDITSIRNGLEDLGLDSLVVEALMQAAANGDFKEFTRAGHISARAARNIIPGLREGLVYSEACARVGYDHAARLSVPLDQVGSPVTRKALSEALKQVRAVAREYGPIDYFHIELARSVGKSAEERKQLTDGIEARNVEKAKRRKQAEEHLGRAPSDDELLRYELAKEQNFKCIYSGDAIDPAGVAANDTRYQVDHILPWSRFGDDSYLNKTLCTARSNQNKRGRTPFEWFEADKTDVEWMEYVARVENLQEVKGRKKRNYSIKDAAAIEDKFKARNLTDTQWATRLLADELSRMFPPRECERAICGRADGGNDGLTIVEERRVFTRPGAITSKLRRAWGLEGLKKQDGKRVEDDRHHAVDALVLAATTESLLQRLTVEVQRREREGRPDDIFHCAEPWRGFRADVRRTVYGSETMPGIFVSRAERRRARGKAHDATIKQIREIEGERLVFERKPVEKLTDKDLEKIPIPKPYGQVSDPKRLRDELVESLRAWIAAGKPKDRPPLSPKGDVIRKVRIQTNDKVSVEINGGTVDRGDMARVDVFRKKNKKAVWEYYVVPIYPHQIVALNDPPDRAVIAYAEDKDWKEIDSSYEFLWSLFGLSYVEISKANGECIDGYFRGLHRGTGAASVCKHISLGKDATVSGIGLKTLASFKKFTIDRLGRKFEIPREVRTWRGEACT

SEQ ID NO: 32 - protein, 1149 aa, Lactobacillus salivarius
MERYHIGLDIGTSSIGWAVIGDDFKIKRKKGKNLIGVRLFKEGDTAAERRGFRTQRRRLNRRKWRLKLLEEIFDPYMAEVDKYFFARLKESNLSPKDSNKKYLGSLLFPDISDSNFYDKYPTIYHLRRDLMEKDKKFDLREIYLAIHHIVKYRGNFLEKVPAKNYKNSGASIGFLLEEVNDLYGNIIGNEDVAILDNDKFEDVEKIILNDEIRNIDKQKNVGRLLVKDKKEKNIVTAFSKAIFGYKFNLEDLLLIESDEKNKLTFNDENIDDIFNELSHSLNDNQMDLLTKTREIYFKFKLNMIVPTGYTISESMIEKYEMHKAHLKMYKEFINTLNAKDRKILKNAYSDYINNEKAKAANAQENFYKTVKKTIKENDSDTAKKIIGLIDEGNFMPKQRTGENGVIPHQLHQIELDRIIENQAKYYPWLAEENPVEKNRKFAKYKLDELVTFRVPYYVGPLIDKTESNKNEKETKFAWMVRKAKGTITPWNFENLVDRTESANRFIKRMTSKDTYIIGEDVLPASSLLYEKYKVLNELNNIKVNKKKLDVEQKQHVYLDLFTTRKNVTKDDLATSLNCDVESITGLTDNKKFNSSLSSYIDLKAILGNIVDDYSKNEDLEKIIEYSTIFEDGNIYKEKLSEISWLTDEQIEKLSNIHFKGWGRLSKKLLTQITNENGERIIDTLWNTSNNFIQVISDESIQAKLAEINGEYANKYNLEDILDEAYTSPQNKKAIRQVMKVVEDIEKAMKCEPTSIAIEFTREKRKSKLTNTRYKKISETYEKITDELISEYELGKLQSELDSKVNNMRDRYYLYFMQLGRDMYTGEKMNIDELHQKYDIDHILPQSFIKDDSLNNRVLTSKSVNIKEKSDKTAADLYAAKMGDFWRKLRKQGLMTEQKYKNLLTRTDSINKYTKQSFIKRQLVETSQVVKLAANILQDKYRNTKIIEIRARLNSDLRKKYELIKNREVNDYHHAIDGYLTTFVGQYLYKVYPKLRSYFVYDDFKKLDSNYLKHMDKFNFIWKLEDKKAEDVYDKVNDEFVLNVPEMKEYIRKIYNYKYMLVSKEVTTKNGAFYDQTKYNAKTINLIPIKKDKPTNIYGGYKGKVSSYMMLVKIQKKKEVIYKFVGVPRLWTDELDRLIDTDEKKALLKK

SEQ ID NO: 33 - protein, 1064 aa, Rhodopseudomonas palustris
MSECVTRRILGIDLGIASCGWGVIEVGEASGSIIASGVRCFDAPLIDKTGEPKSATRRTARGQRRIIRRRRQRMNAVRRLLAEFGVLTGRSPDALHQALLRLSQSVAGSQVTPWTLRAAAHERKLTNDELAVVLGHIARHRGFRSNSKNDGGANAADETSKMKKAMETTREGLARYHSFGAMIASDPKFADRKRNRDKDYSHTAKRSDLEDEVRTIFRSQTRFGSLVASEKLSQAFADAAFFQRPLQDSEDMVGSCPFEPGQKRTARRAPSFELFRFLSRLANLKLTVGRAPERRLTPDEIALAAKGFGETKKSITFKSLREALDLDPNARFSGVAKEKESTLDVAARTGGAAYGTKTLKDALGDAPWRSLSRMPEKLDRIAEILSFREDMKAIRNGLEEVGLDGLVVDALMQATANGDFKDFTRAAHISALAARNIIPGLREGLVYSDACTRVGYDHAARPAVPLSQIGSPVTRKALSEALKQVRAVAREYGPIDYFHIELARSIGKSAEERKKLTDGIEARNVEKEKRRKEAAEHLGRAPSDDELLRYELAKEQNFKCIYSGDPIDPAGISANDTRYQVDHILPWSRFGDDSYVNKTLCTARSNQNKRGRTPFEWFDADKTEAEWMEYSARVEDLKEVKGRKKRNYSIKDAASVEDKFKARNLTDTQWATRLLADELKRMFPPRECERVVTVRADGGNDGLSIVEERRVFTRPGAITSKLRRAWGLEGLKKQDGKRVEDDRHHAVDALVLAATTESLLNRLTVEVQQREREGRQDDIFHCSQPWPGFRVDVQRTVYGSETMPGIFVSRAERRRARGKAHDATVKQIRDIDGERIVFERKPIEKLTDKDLERIPVPEPYGKAADPKKLRDELVENLRAWIAAGKPKDKPPRSPKGDIIRKVRIETKDKVAVEINGGTVDRGDMARVDVFRKKNKKGVWEFYVIPIYPHQIVASALPPNRAVIAYKAESEWTAIDGCFEFAWSLNPMSYLELVKSNGELIEGYFRSMDRTTGAINLSPMSTNSETIRSIGVKTLSSFRKFTVDRLGRKFEIPREVRTWRGEACT

SEQ ID NO: 34 - protein, 1166 aa, Nitrobacter hamburgensis
MHVEIDFPHFSRGDSHLAMNKNEILRGSSVLYRLGLDLGSNSLGWFVTHLEKRGDRHEPVALGPGGVRIFPDGRDPQSGTSNAVDRRMARGARKRRDRFVERRKELIAALIKYNLLPDDARERRALEVLDPYALRKTALTDTLPAHHVGRALFHLNQRRGFQSNRKTDSKQSEDGAIKQAASRLATDKGNETLGVFFADMHLRKSYEDRQTAIRAELVRLGKDHLTGNARKKIWAKVRKRLFGDEVLPRADAPHGVRARATITGTKASYDYYPTRDMLRDEFNAIWAGQSAHHATITDEARTEIEHIIFYQRPLKPAIVGKCTLDPATRPFKEDPEGYRAPWSHPLAQRFRILSEARNLEIRDTGKGSRRLTKEQSDLVVAALLANREVKFDKLRTLLKLPAEARFNLESDRRAALDGDQTAARLSDKKGFNKAWRGFPPERQIAIVARLEETEDENELIAWLEKECALDGAAAARVANTTLPDGHCRLGLRAIKKIVPIMQDGLDEDGVAGAGYHIAAKRAGYDHAKLPTGEQLGRLPYYGQWLQDAVVGSGDARDQKEKQYGQFPNPTVHIGLGQLRRVVNDLIDKYGPPTEISIEFTRALKLSEQQKAERQREQRRNQDKNKARAEELAKFGRPANPRNLLKMRLWEELAHDPLDRKCVYTGEQISIERLLSDEVDIDHILPVAMTLDDSPANKIICMRYANRHKRKQTPSEAFGSSPTLQGHRYNWDDIAARATGLPRNKRWRFDANAREEFDKRGGFLARQLNETGWLARLAKQYLGAVTDPNQIWVVPGRLTSMLRGKWGLNGLLPSDNYAGVQDKAEEFLASTDDMEFSGVKNRADHRHHAIDGLVTALTDRSLLWKMANAYDEEHEKFVIEPPWPTMRDDLKAALEKMVVSHKPDHGIEGKLHEDSAYGFVKPLDATGLKEEEAGNLVYRKAIESLNENEVDRIRDIQLRTIVRDHVNVEKTKGVALADALRQLQAPSDDYPQFKHGLRHVRILKKEKGDYLVPIANRASGVAYKAYSAGENFCVEVFETAGGKWDGEAVRRFDANKKNAGPKIAHAPQWRDANEGAKLVMRIHKGDLIRLDHEGRARIMVVHRLDAAAGRFKLADHNETGNLDKRHATNNDIDPFRWLMASYNTLKKLAAVPVRVDELGRVWRVMPN

SEQ ID NO: 35 - protein, 641 aa, Nitrobacter hamburgensis
MHKRNSRSYRLGLDLGSNSLGWFVTHLEKRGDRYEPVALDPGGVRIFPDGRDPQSGMSNAVDRRMARGARKRRDRFVDPYALRKAALTNALPAHRVGRAIFHLNQRRGFQSNRKTDRKQSEDGAIKQAASKLKARMHEEAAPTLGAFFADMHLRKSYDDQQTAIRAELVRLGKDHLTGNARKKVWAKVRKRLFGDEVLRPKDTSDGARARATTTGTKASYDFYPTRAMLLDEFNAIWAAQREHHLAMTDEAKAEIEHIIFYHRPLKPAIVGKCTLDPATRPFKEDPEGYRAPWSHPLAQRFRILSEARNLEIRETGKTSRRLTKDQSDLVVAALLANREVKFDKLRTLLKLPAEARFNLESDRRSTATRPPHGCRTRRASIRRGAGFLRNGRSRSSPDWKKPKTKTNCSHGSKWNAHLTAQRPRASPIRRCRTAIAGSACAQSKRSCRSCRTSSMRMALRAPAITSWPSVPATTIPVDTFQQGGNAFGRILSVVTIELFAITDRVDPVQEQDARCFALRIAECRSDGLQHFAEVSLGLPPRNAAQDQRHSAGLCQSSCVGRFVPGTPCRRTPRSTSLHGKEPSAHAFGSTARSRPQLPASPRPCMSFRDGTSSSPARMPETLDRCAISRSNRSSVCRAERL

SEQ ID NO: 36 - protein, 1368 aa, Streptococcus pyogenes
MDKKYSIGLDIGTNSVGWAVITDDYKVPSKKFKVLGNTDRHSIKKNLIGALLFDSGEIAEATRLKRTARRRYTRRKNRICYLQEIFSNEMAKVDDSFFHRLEESFLVEEDKKHERHPIFGNIVDEVAYHEKYPTIYHLRKKLVDSTDKADLRLIYLALAHMIKFRGHFLIEGDLNPDNSDVDKLFIQLVQTYNQLFEENPINASGVDAKAILSARLSKSRRLENLIAQLPGEKKNGLFGNLIALSLGLTPNFKSNFDLAEDAKLQLSKDTYDDDLDNLLAQIGDQYADLFLAAKNLSDAILLSDILRLNSEITKAPLSASMIKRYDEHHQDLTLLKALVRQQLPEKYKEIFFDQSKNGYAGYIDGGASQEEFYKFIKPILEKMDGTEELLAKLNREDLLRKQRTFDNGSIPHQIHLGELHAILRRQEDFYPFLKDNREKIEKILTFRIPYYVGPLARGNSRFAWMTRKSEETITPWNFEEVVDKGASAQSFIERMTNFDKNLPNEKVLPKHSLLYEYFTVYNELTKVKYVTEGMRKPAFLSGEQKKAIVDLLFKTNRKVTVKQLKEDYFKKIECFDSVEISGVEDRFNASLGTYHDLLKIIKDKDFLDNEENEDILEDIVLTLTLFEDREMIEERLKTYAHLFDDKVMKQLKRRRYTVWGRLSRKLINGIRDKQSGKTILDFLKSDGFANRNFMQLIHDDSLTFKEDIQKAQVSGQGDSLHEHIANLAGSPAIKKGILQTVKVVDELVKVMGRHKPENIVIEMARENQTTQKGQKNSRERMKRIEEGIKELGSQILKEHPVENTQLQNEKLYLYYLQNGRDMYVDQELDINRLSDYDVDHIVPQSFIKDDSIDNKVLTRSDKNRGKSDNVPSEEVVKKMKNYWRQLLNAKLITQRKFDNLTKAERGGLSELDKAGFIKRQLVETRQITKHVAQILDSRMNTKYDENDKLIREVKVITLKSKLVSDFRKDFQFYKVREINNYHHAHDAYLNAVVGTALIKKYPKLESEFVYGDYKVYDVRKMLAKSEQEIGKATAKYFFYSNIMNFFKTEITLANGEIRKRPLIETNGETGEIVWDKGRDFATVRKVLSMPQVNIVKKTEVQTGGFSKESILPKRNSDKLIARKKDWDPKKYGGFDSPTVAYSVLVVAKVEKGKSKKLKSVKELLGITIMERSSFEKNPIDFLEAKGYKEVRKDLIIKLPKYSLFELENGRKRMLASAGELQKGNELALPSKYVNFLYLASHYEKLKGSPEDNEQKQLFVEQHKHYLDEIIEQISEFSKRVILADANLDKVLSAYNKHRDKPIREQAENIIHLFTLTNLGAPTAFKYFDTTIDRKRYTSTKEVLDATFIHQSITGLYETRIDLSQLGGD

SEQ ID NO: 37 - protein, 1368 aa, Streptococcus pyogenes
MDKKYSIGLDIGTNSVGWAVITDDYKVPSKKFKVLGNTDRHSIKKNLIGALLFDSGETAEATRLKRTARRRYTRRKNRICYLQEIFSNEMAKVDDSFFHRLEESFLVEEDKKHERHPIFGNIVDEVAYHEKYPTIYHLRKKLVDSTDKADLRLIYLALAHMIKFRGHFLIEGDLNPDNSDVDKLFIQLVQTYNQLFEENPINASGVDAKAILSARLSKSRRLENLIAQLPGEKKNGLFGNLIALSLGLTPNFKSNFDLAEDAKLQLSKDTYDDDLDNLLAQIGDQYADLFLAAKNLSDAILLSDILRLNSEITKAPLSASMIKRYDEHHQDLTLLKALVRQQLPEKYKEIFFDQSKNGYAGYIDGGASQEEFYKFIKPILEKMDGTEELLAKLNREDLLRKQRTFDNGSIPHQIHLGELHAILRRQEDFYPFLKDNREKIEKILTFRIPYYVGPLARGNSRFAWMTRKSEETITPWNFEEVVDKGASAQSFIERMTNFDKNLPNEKVLPKHSLLYEYFTVYNELTKVKYVTEGMRKPAFLSGEQKKAIVDLLFKTNRKVTVKQLKEDYFKKIECFDSVEISGVEDRFNASLGTYHDLLKIIKDKDFLDNEENEDILEDIVLTLTLFEDREMIEERLKTYAHLFDDKVMKQLKRRRYTGWGRLSRKLINGIRDKQSGKTILDFLKSDGFANRNFMQLIHDDSLTFKEDIQKAQVSGQGDSLHEHIANLAGSPAIKKGILQTVKVVDELVKVMGRHKPENIVIEMARENQTTQKGQKNSRERMKRIEEGIKELGSQILKEHPVENTQLQNEKLYLYYLQNGRDMYVDQELDINRLSDYDVDHIVPQSFIKDDSIDNKVLTRSDKNRGKSDNVPSEEVVKKMKNYWRQLLNAKLITQRKFDNLTKAERGGLSELDKAGFIKRQLVETRQITKHVAQILDSRMNTKYDENDKLIREVKVITLKSKLVSDFRKDFQFYKVREINNYHHAHDAYLNAVVGTALIKKYPKLESEFVYGDYKVYDVRKMIAKSEQEIGKATAKYFFYSNIMNFFKTEITLANGEIRKRPLIETNGETGEIVWDKGRDFATVRKVLSMPQVNIVKKTEVQTGGFSKESILPKRNSDKLIARKKDWDPKKYGGFDSPTVAYSVLVVAKVEKGKSKKLKSVKELLGLTIMERSSFEKNPIDFLEAKGYKEVKKDLIIKLPKYSLFELENGRKRMLASAGELQKGNELALPSKYVNFLYLASHYEKLKGSPEDNEQKQLFVEQHKHYLDEIIEQISEFSKRVILADANLDKVLSAYNKHRDKPIREQAENIIHLFTLTNLGAPAAFKYFDTTIDRKRYTSTKEVLDATLIHQSITGLYETRIDLSQLGGD

SEQ ID NO: 38 - protein, 1368 aa, Streptococcus pyogenes
MDKKYSIGLDIGTNSVGWAVITDDYKVPSKKFKVLGNTDRHSIKKNLIGALLFDSGEIAEATRLKRTARRRYTRRKNRICYLQEIFSNEMAKVDDSFFHRLEESFLVEEDKKHERHPIFGNIVDEVAYHEKYPTIYHLRKKLVDSTDKADLRLIYLALAHMIKFRGHFLIEGDLNPDNSDVDKLFIQLVQTYNQLFEENPINASGVDAKAILSARLSKSRRLENLIAQLPGEKKNGLFGNLIALSLGLTPNFKSNFDLAEDAKLQLSKDTYDDDLDNLLAQIGDQYADLFLAAKNLSDAILLSDILRLNSEITKAPLSASMIKRYDEHHQDLTLLKALVRQQLPEKYKEIFFDQSKNGYAGYIDGGASQEEFYKFIKPILEKMDGTEELLAKLNREDLLRKQRTFDNGSIPHQIHLGELHAILRRQEDFYPFLKDNREKIEKILTFRIPYYVGPLARGNSRFAWMTRKSEETITPWNFEEVVDKGASAQSFIERMTNFDKNLPNEKVLPKHSLLYEYFTVYNELTKVKYVTEGMRKPAFLSGEQKKAIVDLLFKTNRKVTVKQLKEDYFKKIECFDSVEISGVEDRFNASLGTYHDLLKIIKDKDFLDNEENEDILEDIVLTLTLFEDREMIEERLKTYAHLFDDKVMKQLKRRRYTGWGRLSRKLINGIRDKQSGKTILDFLKSDGFANRNFMQLIHDDSLTFKEDIQKAQVSGQGDSLHEHIANLAGSPAIKKGILQTVKVVDELVKVMGRHKPENIVIEMARENQTTQKGQKNSRERMKRIEEGIKELGSQILKEHPVENTQLQNEKLYLYYLQNGRDMYVDQELDINRLSDYDVDHIVPQSFIKDDSIDNKVLTRSDKNRGKSDNVPSEEVVKKMKNYWRQLLNAKLITQRKFDNLTKAERGGLSELDKAGFIKRQLVETRQITKHVAQILDSRMNTKYDENDKLIREVKVITLKSKLVSDFRKDFQFYKVREINNYHHAHDAYLNAVVGTALIKKYPKLESEFVYGDYKVYDVRKMLAKSEQEIGKATAKYFFYSNIMNFFKTEITLANGEIRKRPLIETNGETGEIVWDKGRDFATVRKVLSMPQVNIVKKTEVQTGGFSKESILPKRNSDKLIARKKDWDPKKYGGFDSPTVAYSVLVVAKVEKGKSKKLKSVKELLGITIMERSSFEKNPIDFLEAKGYKEVRKDLIIKLPKYSLFELENGRKRMLASAGELQKGNELALPSKYVNFLYLASHYEKLKGSPEDNEQKQLFVEQHKHYLDEIIEQISEFSKRVILADANLDKVLSAYNKHRDKPIREQAENIIHLFTLTNLGAPTAFKYFDTTIDRKRYTSTKEVLDATFIHQSITGLYETRIDLSQLGGD

SEQ ID NO: 39 - protein, 1371 aa, Streptococcus pyogenes
MDKKYSIGLDIGTNSVGWAVITDDYKVPSKKFKVLGNTDRHSIKKNLIGALLFDSGETAEATRLKRTARRRYTRRKNRICYLQEIFSNEMAKVDDSFFHRLEESFLVEEDKKHERHPIFGNIVDEVAYHEKYPTIYHLRKKLADSTDKADLRLIYLALAHMIKFRGHFLIEGDLNPDNSDVDKLFIQLVQTYNQLFEENPINASRVDAKAILSARLSKSRRLENLIAQLPGEKKNGLFGNLIALSLGLTPNFKSNFDLAEDAKLQLSKDTYDDDLDNLLAQIGDQYADLFLAAKNLSDATLLSDILRVNSEITKAPLSASMIKRYDEHHQDLTLLKALVRQQLPEKYKEIFFDQSKNGYAGYIDGGASQEEFYKFIKPILEKMDGTEELLAKLNREDLLRKQRTFDNGSIPHQIHLGELHAILRRQEDFYPFLKDNREKIEKILTFRIPYYVGPLARGNSRFAWMTRKSEETITPWNFEEVVDKGASAQSFIERMTNFDKNLPNEKVLPKHSLLYEYFTVYNELTKVKYVTEGMRKPAFLSGEQKKAIVDLLFKTNRKVTVKQLKEDYFKKIECFDSVEISGVEDRFNASLGTYHDLLKIIKDKDFLDNEENEDILEDIVLTLTLFEDKEMIEERLKTYAHLFDDKVMKQLKRRHYTGWGRLSRKLINGIRDKQSGKTILDFLKSDGFANRNFIQLIHDDSLTFKEAIQKAQVSGQGHSLHEQIANLAGSPAIKKGILQSVKVVDELVKVMGHKPENIVIEMARENQTTQKGQKNSRERMKRIEEGIKELGSQILKEHPVENTQLQNEKLYLYYLQNGRDMYVDQELDINRLSDYDVDHIVPQSFIKDDSIDNKVLTRSDKNRGKSDDVPSEEVVKKMKNYWRQLLNAKLITQRKFDNLTKAERGGLSELDKAGFIKRQLVETRQITKHVAQILDSRMNTKYDENDKLIREVKVITLKSKLVSDFRKDFQFYKVREINNYHHAHDAYLNAVVGTALIKKYPKLESEFVYGDYKVYDVRKMIAKSEQEIGKATAKRFFYSNIMNFFKTEITLANGEIRKRPLIETNEETGEIVWDKGRDFATVRKVLSMPQVNIVKKTEVQTGALTNESIYARGSFDKLISRKHRFESSKYGGFGSPTVTYSVLVVAKSKVQDGKVKKIKTGKELIGITLLDKLVFEKNPLKFIEDKGYGNVQIDKCIKLPKYSLFEFENGTRRMLASVMANNNSRGDLQKANEMFLPAKLVTLLYHAHKIESSKELEHEAYILDHYNDLYQLLSYIERFASLYVDVEKNISKVKELFSNIESYSISEICSSVINLLTLTASGAPADFKFLGTTIPRKRYGSPQSILSSTLIHQSITGLYETRIDLSQLGSD

SEQ ID NO: 40 - protein, 1121 aa, Streptococcus thermophilus
MSDLVLGLDIGIGSVGVGILNKVTGEIIHKNSRIFPAAQAENNLVRRTNRQGRRLARRKKHRRVRLNRLFEESGLITDFTKISINLNPYQLRVKGLTDELSNEELFIALKNMVKHRGISYLDDASDDGNSSVGDYAQIVKENSKQLETKTPGQIQLERYQTYGQLRGDFTVEKDGKKHRLINVFPTSAYRSEALRILQTQQEFNPQITDEFINRYLEILTGKRKYYHGPGNEKSRTDYGRYRTSGETLDNIFGILIGKCTFYPDEFRAAKASYTAQEFNLLNDLNNLTVPTETKKLSKEQKNQIINYVKNEKAMGPAKLFKYIAKLLSCDVADIKGYRIDKSGKAEIHTFEAYRKMKTLETLDIEQMDRETLDKLAYVLTLNTEREGIQEALEHEFADGSFSQKQVDELVQFRKANSSIFGKGWHNFSVKLMMELIPELYETSEEQMTILTRLGKQKTTSSSNKTKYIDEKLLTEEIYNPVVAKSVRQAIKIVNAAIKEYGDFDNIVIEMARETNEDDEKKAIQKIQKANKDEKDAAMLKAANQYNGKAELPHSVFHGHKQLATKIRLWHQQGERCLYTGKTISIHDLINNSNQFEVDHILPLSITFDDSLANKVLVYATANQEKGQRTPYQALDSMDDAWSFRELKAFVRESKTLSNKKKEYLLTEEDISKFDVRKKFIERNLVDTRYASRVVLNALQEHFRAHKIDTKVSVVRGQFTSQLRRHWGIEKTRDTYHHHAVDALIIAASSQLNLWKKQKNTLVSYSEDQLLDIETGELISDDEYKESVFKAPYQHFVDTLKSKEFEDSILFSYQVDSKFNRKISDATIYATRQAKVGKDKADETYVLGKIKDIYTQDGYDAFMKIYKKDKSKFLMYRHDPQTFEKVIEPILENYPNKQINEKGKEVPCNPFLKYKEEHGYIRKYSKKGNGPEIKSLKYYDSKLGNHIDITPKDSNNKVVLQSVSPWRADVYFNKTTGKYEILGLKYADLQFEKGTGTYKISQEKYNDIKKKEGVDSDSEFKFTLYKNDLLLVKDTETKEQQLFRFLSRTMPKQKHYVELKPYDKQKFEGGEALIKVLGNVANSGQCKKGLGKSNISIYKVRTDVLGNQHIIKNEGDKPKLDF

SEQ ID NO: 41 - protein, 1388 aa, Streptococcus thermophilus
MTKPYSIGLDIGTNSVGWAVTTDNYKVPSKKMKVLGNTSKKYIKKNLLGVLLFDSGITAEGRRLKRTARRRYTRRRNRILYLQEIFSTEMATLDDAFFQRLDDSFLVPDDKRDSKYPIFGNLVEEKAYHDEFPTIYHLRKYLADSTKKADLRLVYLALAHMIKYRGHFLIEGEFNSKNNDIQKNFQDFLDTYNAIFESDLSLENSKQLEEIVKDKISKLEKKDRILKLFPGEKNSGIFSEFLKLIVGNQADFRKCFNLDEKASLHFSKESYDEDLETLLGYIGDDYSDVFLKAKKLYDAILLSGFLTVTDNETEAPLSSAMIKRYNEHKEDLALLKEYIRNISLKTYNEVFKDDTKNGYAGYIDGKTNQEDFYVYLKKLLAEFEGADYFLEKIDREDFLRKQRTFDNGSIPYQIHLQEMRAILDKQAKFYPFLAKNKERIEKILTFRIPYYVGPLARGNSDFAWSIRKRNEKITPWNFEDVIDKESSAEAFINRMTSFDLYLPEEKVLPKHSLLYETFNVYNELTKVRFIAESMRDYQFLDSKQKKDIVRLYFKDKRKVTDKDIIEYLHAIYGYDGIELKGIEKQFNSSLSTYHDLLNIINDKEFLDDSSNEAIIEEIIHTLTIFEDREMIKQRLSKFENIFDKSVLKKLSRRHYTGWGKLSAKLINGIRDEKSGNTILDYLIDDGISNRNFMQLIHDDALSFKKKIQKAQIIGDEDKGNIKEVVKSLPGSPAIKKGILQSIKIVDELVKVMGGRKPESIVVEMARENQYTNQGKSNSQQRLKRLEKSLKELGSKILKENIPAKLSKIDNNALQNDRLYLYYLQNGKDMYTGDDLDIDRLSNYDIDHIIPQAFLKDNSIDNKVLVSSASNRGKSDDVPSLEVVKKRKTFWYQLLKSKLISQRKFDNLTKAERGGLSPEDKAGFIQRQLVETRQITKHVARLLDEKFNNKKDENNRAVRTVKIITLKSTLVSQFRKDFELYKVREINDFHHAHDAYLNAVVASALLKKYPKLEPEFVYGDYPKYNSFRERKSATEKVYFYSNIMNIFKKSISLADGRVIERPLIEVNEETGESVWNKESDLATVRRVLSYPQVNVVKKVEEQNHGLDRGKPKGLFNANLSSKPKPNSNENLVGAKEYLDPKKYGGYAGISNSFTVLVKGTIEKGAKKKITNVLEFQGISILDRINYRKDKLNFLLEKGYKDIELIIELPKYSLFELSDGSRRMLASILSTNNKRGEIHKGNQIFLSQKFVKLLYHAKRISNTINENHRKYVENHKKEFEELFYYILEFNENYVGAKKNGKLLNSAFQSWQNHSIDELCSSFIGPTGSERKGLFELTSRGSAADFEFLGVKIPRYRDYTPSSLLKDATLIHQSVTGLYETRIDLAKLGEG

SEQ ID NO: 42 - protein, 1138 aa, Acidothermus cellulolyticus
MGGSEVGTVPVTWRLGVDVGERSIGLAAVSYEEDKPKEILAAVSWIHDGGVGDERSGASRLALRGMARRARRLRRFRRARLRDLDMLLSELGWTPLPDKNVSPVDAWLARKRLAEEYVVDETERRRLLGYAVSHMARHRGWRNPWTTIKDLKNLPQPSDSWERTRESLEARYSVSLEPGTVGQWAGYLLQRAPGIRLNPTQQSAGRRAELSNATAFETRLRQEDVLWELRCIADVQGLPEDVVSNVIDAVFCQKRPSVPAERIGRDPLDPSQLRASRACLEFQEYRIVAAVANLRIRDGSGSRPLSLEERNAVIEALLAQTERSLTWSDIALEILKLPNESDLTSVPEEDGPSSLAYSQFAPFDETSARIAEFIAKNRRKIPTFAQWWQEQDRTSRSDLVAALADNSIAGEEEQELLVHLPDAELEALEGLALPSGRVAYSRLTLSGLTRVMRDDGVDVHNARKTCFGVDDNWRPPLPALHEATGHPVVDRNLAILRKFLSSATMRWGPPQSIVVELARGASESRERQAEEEAARRAHRKANDRIRAELRASGLSDPSPADLVRARLLELYDCHCMYCGAPISWENSELDHIVPRTDGGSNRHENLAITCGACNKEKGRRPFASWAETSNRVQLRDVIDRVQKLKYSGNMYWTRDEFSRYKKSVVARLKRRTSDPEVIQSIESTGYAAVALRDRLLSYGEKNGVAQVAVFRGGVTAEARRWLDISIERLFSRVAIFAQSTSTKRLDRRHHAVDAVVLTTLTPGVAKTLADARSRRVSAEFWRRPSDVNRHSTEEPQSPAYRQWKESCSGLGDLLISTAARDSIAVAAPLRLRPTGALHEETLRAFSEHTVGAAWKGAELRRIVEPEVYAAFLALTDPGGRFLKVSPSEDVLPADENRHIVLSDRVLGPRDRVKLFPDDRGSIRVRGGAAYIASFHHARVFRWGSSHSPSFALLRVSLADLAVAGLLRDGVDVFTAELPPWTPAWRYASIALVKAVESGDAKQVGWLVPGDELDFGPEGVTTAAGDLSMFLKYFPERHWVVTGFEDDKRINLKPAFLSAEQAEVLRTERSDRPDTLTEAGEILAQFFPRCWRATVAKVLCHPGLTVIRRTALGQPRWRRGHLPYSWRPWSADPWSGGTP

SEQ ID NO: 43 - protein, 1629 aa, Francisella novicida
MNFKILPIAIDLGVKNTGVFSAFYQKGTSLERLDNKNGKVYELSKDSYTLLMNNRTARRHQRRGIDRKQLVKRLFKLIWTEQLNLEWDKDTQQAISFLFNRRGFSFITDGYSPEYLNIVPEQVKAILMDIFDDYNGEDDLDSYLKLATEQESKISEIYNKLMQKILEFKLMKLCTDIKDDKVSTKTLKEITSYEFELLADYLANYSESLKTQKFSYTDKQGNLKELSYYHHDKYNIQEFLKRHATINDRILDTLLTDDLDIWNFNFEKFDFDKNEEKLQNQEDKDHIQAHLHHFVFAVNKIKSEMASGGRHRSQYFQEITNVLDENNHQEGYLKNFCENLHNKKYSNLSVKNLVNLIGNLSNLELKPLRKYFNDKIHAKADHWDEQKFTETYCHWILGEWRVGVKDQDKKDGAKYSYKDLCNELKQKVTKAGLVDFLLELDPCRTIPPYLDNNNRKPPKCQSLILNPKFLDNQYPNWQQYLQELKKLQSIQNYLDSFETDLKVLKSSKDQPYFVEYKSSNQQIASGQRDYKDLDARILQFIFDRVKASDELLLNEIYFQAKKLKQKASSELEKLESSKKLDEVIANSQLSQILKSQHTNGIFEQGTFLHLVCKYYKQRQRARDSRLYIMPEYRYDKKLHKYNNTGRFDDDNQLLTYCNHKPRQKRYQLLNDLAGVLQVSPNFLKDKIGSDDDLFISKWLVEHIRGFKKACEDSLKIQKDNRGLLNHKINIARNTKGKCEKEIFNLICKIEGSEDKKGNYKHGLAYELGVLLFGEPNEASKPEFDRKIKKFNSIYSFAQIQQIAFAERKGNANTCAVCSADNAHRMQQIKITEPVEDNKDKIILSAKAQRLPAIPTRIVDGAVKKMATILAKNIVDDNWQNIKQVLSAKHQLHIPIITESNAFEFEPALADVKGKSLKDRRKKALERISPENIFKDKNNRIKEFAKGISAYSGANLTDGDFDGAKEELDHIIPRSHKKYGTLNDEANLICVTRGDNKNKGNRIFCLRDLADNYKLKQFETTDDLEIEKKIADTIWDANKKDFKFGNYRSFINLTPQEQKAFRHALFLADENPIKQAVIRAINNRNRTFVNGTQRYFAEVLANNIYLRAKKENLNTDKISFDYFGIPTIGNGRGIAEIRQLYEKVDSDIQAYAKGDKPQASYSHLIDAMLAFCIAADEHRNDGSIGLEIDKNYSLYPLDKNTGEVFTKDIFSQIKITDNEFSDKKLVRKKAIEGFNTHRQMTRDGIYAENYLPILIHKELNEVRKGYTWKNSEEIKIFKGKKYDIQQLNNLVYCLKFVDKPISIDIQISTLEELRNILTTNNIAATAEYYYINLKTQKLHEYYIENYNTALGYKKYSKEMEFLRSLAYRSERVKIKSIDDVKQVLDKDSNFIIGKITLPFKKEWQRLYREWQNTTIKDDYEFLKSFFNVKSITKLHKKVRKDFSLPISTNEGKFLVKRKTWDNNFIYQILNDSDSRADGTKPFIPAFDISKNEIVEAIIDSFTSKNIFWLPKNIELQKVDNKNIFAIDTSKWFEVETPSDLRDIGIATIQYKIDNNSRPKVRVKLDYVIDDDSKINYFMNHSLLKSRYPDKVLEILKQSTIIEFESSGFNKTIKEMLGMKLAGIYNETSNN

SEQ ID NO: 44 - protein, 1068 aa, Verminephrobacter eiseniae
MNKAVAYRLALDLGSTSLGWAIFRLNEAREPTAIIRAGVRIFSDGRNANSEPLAVHRRVARAMRRRRDRLLKRKKRMHDQLVQHGFFPAEVAERKELERLNPYQLRAKGLHEALTPGEFARALFHINQRRGFKSNRKTDRKDNDSGALKQAISELRKRIQDSDCATAGEWFWKERMQQKPEGVRGQWVRARYRKTPSTTDEGKKRIGYDLYVDRAMVEQEFDALWAAQAALQPGLFTEAARAELKDTLLYQRDLRPVKPGRCTLLPAEERAPLALPSTQRFRILQEVNNLRLLDEALREVPLNLAQRDAVVSALEGKKELSFAAIRKLLTLSGKFNLEDEKRAELKGNATSVILARKDLFGDAWAGFDAAVQDEIVWRLVSQESEGALIAWLQQHTGVDGVCAEAIVNTRLPDGYGRLSRKALERIVPALQREVCTYDKAVQAAGFAHHSDLGFDFDYAEDEVQQVGEHTIASTGEVQAQYAFKQLPYYGKALQRHVAFGSGDAKDHEEKCYGKIANPTVHIGLNQVRTVVNALIRRYGHPTEVVVELARDLKQSREQKQQTQREQADNQKRNEDIRKRIAPILETSPERVRDRDIKKWILWEELNKKDIADRHCPYSGERISATMLLSEAVEIEHILPFSRTLDDSLNNRTVAMRRANRIKGDRTPWEARADFEAQGWRYEAILQRAEGMPPRKRYRFAEDGYQRWLGKDRNFLARALNDTSYLSRLAANYLRLVCPQGVRVIPGQMTDKLRGKFGLNSVLGLDGKKNRNDHRHHAVDACVIGVTDQGLMQRFANASKQARENGLTRLVQDMLLPWWPSYYDHVERAVRHIRVSHRPDHGFEGAMMKGTAHGIREDGIREDGRIKQRPKAKGSADHKTITLIPIDEPRQLARHGVDAEGKPLPYKGYASGSNYCIEITKNGKGKWEGQVISTFDAYRIKAAADAAARAGQVISTVEADSIVRKSGWERLRGAQSQNGQPLVMRLVIGDSVRMEVDGRDEVMRVVKMSGKEMVFAPVREANVDKRNNMPDEQDPFTYTYKRADQLRKAKARQVTISPIGELRDPGFKG

SEQ ID NO: 45 - protein, 1125 aa, Francisella tularensis
MNVKILPIAIDLDVKNTGVFSAFYQKGTSLEKLDNKNGKVYELSKDSYTLLMNNRTARRHQRRGIDRKQLVKRLFKLVWTEQLNLEWDKDTQQAISFLFNRRGFSFITDGYSTEYLNIVPEQVKAILMDIFDDYNGEDDLDSYLKLATEQESKISEIYNKLMQKILEFKLRKLCTDIKDDKVSTKTLKEITSYEFELLADYLANYSESLKIQKFSYTDKQGNLKELSYYHHDKYNIQEFLKRHATINDEILDTLLTDDFDIWNFNFEKFDFDKNEEKLQNQEDKDHTQAHLHHFVFAVNKIKSEMASGGRHRSQYFQEITNVLDENNHQEGYLKNFCENLHNKKYSNLSVKNLVNLVGNLSNLELKPLRKYFNDKIHAKADHWDEQKFTETYCHWILGEWRVGVKDQDKKDGAKYSYKDLCNELKQKVTKAGLIDFLLELDPCRTIPPYLDNNNRKPPKCQSLILNPKFLDNQYPNWQQYLQELKKLQSIQDYLDSFETDLKDLKSSKDQPYFVEYKSSNQQMASGQRDYKDLDARILQFIFDRVKASDELLLNEIYFQAKKLKQKASSELEKLESSKKLDEVIANSQLSQILKSQHTNGIFEQGTFLHLVCKYYKQRQRARDSRLYIMPEYRYDKKLDKYNNTGRFDDNNQLLTYCNHKPRQKRYQLLNDLAGVLQVSRNQLLSSVEEWFQQAQRVGEISKSQDEQIFEWLKSFKIASYCKAAVEMQKQYRGTLKNAIQTAIFRQSENINKNKNKNTGNQQQALSENSKDVKSLTADEKKLLKLIENIAKASQKIGESLGLNDKQIKKFNSIYSFAQIQQIAFAERKGNANTCAVCSADNAHRMQQIKITELVEDNKDNIILSAKAQRLPAIPTRIVDGAVKKMATILAKNIVDDNWQNIKQVLSAKHQLHIPIITESNAFEFEPALADVKGKSLKDRRKKALERISPENIFKDKNNRIKEFAKGISAYSGANLTDGDFDGAKEELDHIIPRSHKKYGTLNDEANLICVTRDDNKNIFAIDTSKWFEIETPSDLRDIGVATIQYKIDNNSRPKVRVKLDYVIDDDSKINYFMNHSLLKSRYPDKVLEILKQSTIIEFESSGFNKTIKEMLGMTLAGIYNETSNN

SEQ ID NO: 46 - protein, 1064 aa, Bradyrhizobium sp.
MKRTSLRAYRLGVDLGANSLGWFVVWLDDHGQPEGLGPGGVRIFPDGRNPQSKQSNAAGRRLARSARRRRDRYLQRRGKLMGLLVKHGLMPADEPARKRLECLDPYGLRAKALDEVLPLHHVGRALFHLNQRRGLFANRAIEQGDKDASAIKAAAGRLQTSMQACGARTLGEFLNRRHQLRATVRARSPVGGDVQARYEFYPTRAMVDAEFEAIWAAQAPHHPTMTAEAHDTIREAIFSQRAMKRPSIGKCSLDPATSQDDVDGFRCAWSHPLAQRFRIWQDVRNLAVVETGPTSSRLGKEDQDKVARALLQTDQLSFDEIRGLLGLPSDARFNLESDRRDHLKGDATGAILSARRHFGPAWHDRSLDRQIDIVALLESALDEAAIIASLGTTHSLDEAAAQRALSALLPDGYCRLGLRAIKRVLPLMEAGRTYAEAASAAGYDHALLPGGKLSPTGYLPYYGQWLQNDVVGSDDERDTNERRWGRLPNPTVHIGIGQLRRVVNELIRWHGPPAEITVELTRDLKLSPRRLAELEREQAENQRKNDKRTSLLRKLGLPASTHNLLKLRLWDEQGDVASECPYTGEAIGLERLVSDDVDIDHLIPFSISWDDSAANKVVCMRYANREKGNRTPFEAFGHRQGRPYDWADIAERAARLPRGKRWRFGPGARAQFEELGDFQARLLNETSWLARVAKQYLAAVTHPHRIHVLPGRLTALLRATWELNDLLPGSDDRAAKSRKDHRHHAIDALVAALTDQALLRRMANAHDDTRRKIEVLLPWPTFRIDLETRLKAMLVSHKPDHGLQARLHEDTAYGTVEHPETEDGANLVYRKTFVDISEKEIDRIRDRRLRDLVRAHVAGERQQGKTLKAAVLSFAQRRDIAGHPNGIRHVRLTKSIKPDYLVPIRDKAGRIYKSYNAGENAFVDILQAESGRWIARATTVFQANQANESHDAPAAQPIMRVFKGDMLRIDHAGAEKFVKIVRLSPSNNLLYLVEHHQAGVFQTRHDDPEDSFRWLFASFDKLREWNAELVRIDTLGQPWRRKRGLETGSEDATRIGWTRPKKWP

SEQ ID NO: 47 - protein, 1354 aa, Flavobacterium psychrophilum
MKKILGLDLGTNSIGWAFINEAENEIEVSSIVNTGVRIVPLTTDEESDFKKGNTISINADRTLKRGARRGLQRFKQRREALLETFNRIKFIATDFVYAETGAATTFSSYQLRAKSAVEAVTKEELVKVLLMLNKKRGYKSSRKAKTAEEGDAIDGMKIAKEIFENNLTPGQWVYNSLSKGGKFIPDFYHSDLQKELEKIVRFQNQFHSEQINDKLLADIQGKSRTQTSQHFSKTLNIPLAENKGTREETKLQHYQWRNEALANELDMKILAFIITEINNQINQSSGYLGAISDRSKELYFNQETVGQYQYKQLQENVHAKLKNQVFYRQDYLDEFEKIWETQAKFHSELNEKLKAEIRDITIFYQRKLKSQKHLVSFCEFEKGHKAIPKSSPLFQEFRIWQNLNNVVVKNETTKEVFELSEELKQLIAEELQFKESMTDVQMLTFCELKKGTHTVNFKKIEGNRTNTSIYKAFEKILEVEGYEIDFSKMKPLEIKETVAPIFETLNINTVILDFDPTIQGNDFDKQPYYQLWHLLYSAEDDDKLKETLKTKFGFKENHLPFILNINLQADYGSLSAKAIKKILPHLMDGHIYDKACLMVGYNHSSSLTTAQNNDRVLKDTLELLKKNSLRNPVVEKILNQMINVINAIMKDPAMGKPDEIRVELARELKANNEQRKKATSDINTATTEHERIRKLLHSEFNIPRVTRNDIIRYKLWLETGGISLYTGNPIKASDLFSKNYDIEHIIPKSRLFDDSFSNKTLCERQLNIDKSNKTAYSFLQEKLSENDFAAYENRVKDLFKTGKIKSYTKYKKLLMADNEIPEGFIDRQLRETQYIAKKAKEILLEVSRNVTATIGSVTDKLRQDWELVDVMKELNWEKYDKLGLTHIEEGKNGERLSKIKDWTKRNDHRHHAMDAITVAFTKPAYIQYLNNLNAKTQGENKANSIIGIENKHLYRDKNNKLRFISPMKNFREEAKKQLESILISYKAKNKVVTKNKNTTKKSGGTNQKIQLTPRGRLHKETVYGKLQQYATKEEKVNASFTEDYIQKVAKKEYREALLKRLEENDNDPKKAFTGKNALNKTPIYISLKDNIIVPEKVKTVWLETDYTIRKDITPDLKIDKVIDVGIKRILQNRLNEFNGDPKKAFVNLGESPIWLNKEKGIAIKRVTISGVSNAQALHTKKDHLGNEILDKNGNPIPVDFISTGNNHHVAIYRDEKGNLQEEVVSFYDAVIRRNLGLSVINKNHEKGWEFLFSMKQNEFFIFPSDGFNPHEIDLLNPNNYHLISPNIFRVQKISTKNYMFNHHLETKAVDGEMLKSKKELSKTSYHFIQTPTNLNGIIKVRINHLGKIVHLGEY

SEQ ID NO: 48 - protein, 1062 aa, Actinobacillus succinogenes
MNLNYILGLDLGIASVGWAVVEIDEQENPQRLIDVGVRTFDRAEVLKTGESLALARRLARSSRRLVKRRAERIKKAKRLLKAENLLLSADEILPNEAWQLRVKGLDQKLERQEWAAVLLHLLKHRGYLSQRKNESKSENKELGALLSGVAINHQILQSAEYRTPAEIAVNKFQAEEGHIRNQRGAYTHTFSRLDLLAEMELLFQRQATLGNPHTSTKLLENLTALLMWQKPALAGEAILKMLGKCTFEPTEYKAAKNSYSAERFVWLTKLNNLRILEQGAERALTDNERFALLDQPYEKAKLTYAQVRTLLGLSDEAIFKGLRYQGEDKKAVETKTTLMEVKAYHQIRKALEGLDLKAEWNELKNNPALLDEIGTAFSLYKTDDDIHRYLDGKLSESVLNALLENLNFDKFIQLSLKALQQILPLMLQGQRYDEAVSAIYGDHYGKKSDEIDRLLPNIPTDEIRNPVVLRTLTQARKVINAVVRLYGSPARIHIETGREVGKSYQDRKKLEKQQEENRKQRENAVKKFKEYFPNFVGEPKGKDILKMRLYELQQAKCLYSGKSLELYRLLEKGYVEVDHALPFSRTWDDSFNNKVLVLANENQNKGNATPYEWLDGKNNSEGWQHFVARVQTSGFSYAKKQRVLIQELDEKSFIERNLNDTRYVARFLCNHIADNMLLTGKGKRKVFASNGQITALLRGCWGLQKVRENNDRHHALDAVVVACSTKSMQDKITKFVKYKEGRLFKDKKDGVYKGERINRETGEIISLHFPTPWKFFKENVEIRIFSENPKLELENRLPDYPQYNHEFVQPLFVSRMPTRKMTGQGHMETVKSAKRLDKGLSVLKVPLTQLKLSDLERMVNREREMALYEALKECLEQFGNDPAKAFAEPFYKKGGALVKAVRVEQTQKSGVLVRNGNGVADNATGSIVRVDVFTKGGKYFLVPIYTWQVAKGILPNKAVIQGKDESEWEEMDENAVFQFSMHKNDLIKVKTKKGEIFGYFNGLDRATGSIEIEEHDLEKSKGKNGSHRGLGVKTAFFLEKYQVDELGKNIRPCRPTKRQHVR

SEQ ID NO: 49 - protein, 1340 aa, Dorea longicatena
MEQEYYLGLDMGTGSVGWAVTDSEYHVLRKHGKALWGVRLFESASTAEERRMFRTSRRRLDRRNWRIEILQEIFAEEISKKDPGFFLRMKESKYYPEDKRDINGNCPELPYALFVDDDFTDKDYHKKFPTIYHLRKMLMNTEETPDIRLVYLAIHHMMKHRGHFLLSGDINEIKEFGTTFSKLLENIKNEELDWNLELGKEEYAVVESILKDNMLNRSTKKTRLIKALKAKSICEKAVLNLLAGGTVKLSDIFGLEELNETERPKISFADNGYDDYIGEVENELGEQFYIIETAKAVYDWAVLVEILGKYTSISEAKVATYEKHKSDLQFLKKIVRKYLTKEEYKDIFVSTSDKLKNYSAYIGMTKINGKKVDLQSKRCSKEEFYDFIKKNVLKKLEGQPEYEYLKEELERETFLPKQVNRDNGVIPYQIHLYELKKILGNLRDKIDLIKENEDKLVQLFEFRIPYYVGPLNKIDDGKEGKFTWAVRKSNEKIYPWNFENVVDIEASAEKFIRRMTNKCTYLMGEDVLPKDSLLYSKYMVLNELNNVKLDGEKLSVELKQRLYTDVFCKYRKVTVKKIKNYLKCEGIISGNVEITGIDGDFKASLTAYHDFKEILTGTELAKKDKENIITNIVLFGDDKKLLKKRLNRLYPQITPNQLKKICALSYTGWGRFSKKFLEEITAPDPETGEVWNIITALWESNNNLMQLLSNEYRFMEEVETYNMGKQTKTLSYETVENMYVSPSVKRQIWQTLKIVKELEKVMKESPKRVFIEMAREKQESKRTESRKKQLIDLYKACKNEEKDWVKELGDQEEQKLRSDKLYLYYTQKGRCMYSGEVIELKDLWDNTKYDIDHIYPQSKTMDDSLNNRVLVKKKYNATKSDKYPLNENIRHERKGFWKSLLDGGFISKEKYERLIRNTELSPEELAGFIERQIVETRQSTKAVAEILKQVFPESEIVYVKAGTVSRFRKDFELLKVREVNDLHHAKDAYLNIVVGNSYYVKFTKNASWFIKENPGRTYNLKKMFTSGWNIERNGEVAWEVGKKGTIVTVKQIMNKNNILVTRQVHEAKGGLFDQQIMKKGKGQIAIKETDERLASIEKYGGYNKAAGAYFMLVESKDKKGKTIRTIEFIPLYLKNKIESDESIALNFLEKGRGLKEPKILLKKIKIDTLFDVDGFKMWLSGRTGDRLLFKCANQLILDEKIIVTMKKIVKFIQRRQENRELKLSDKDGIDNEVLMEIYNTFVDKLENTVYRIRLSEQAKTLIDKQKEFERLSLEDKSSTLFEILHIFQCQSSAANLKMIGGPGKAGILVMNNNISKCNKISIINQSPTGIFENEIDLLKI

SEQ ID NO: 50 - protein, 984 aa, Campylobacter jejuni
MAKILAFDIGISSIGWAFSENDELKDCGVRIFTKAENPKTGESLALPRRIARSARKRLARRKARLNHLKHLIANEFKLNYEDYQSFDEILAKAYKGSLISPYELRFRALNELLSKQDFARVILHIAKRRGYDDIKNNGDEEKGKILKAIKQNEEKLANYQSVGEYLYKEYFQKFKENSKEFINVRNKKESYERCIAQSFLKDELKLIFKKQREFGFSFSKKFEEEVLSVAFYKRALKDFSHLVGNCSFFTDEKRAPKNSPLAFMFVALTRIINLLNNLKNTLYTKDDLNALLNEVLKNGTLTYKQTKKLLGLSDDYEFKGEKGNYFIEFKKYKEFIKALGEHSLSQDDLNEIAKDITLIKDEIKLKKALAKYDLNENQIDNLSKLEFKDHLNISFKALKLITPLMLEGKKYDEACNELTLKVAINEDKKDFLPAFNETYYKDEVTNPVVLRAIKEYRKVLNALLKKYGKVHKINIELAREVGKNHSQRAKIEKEQNENYKAKKDAELECEKLGLKINSKNILKLRLFKEQKEFCVYSGEKIKLSDLQDEKMLEIDHIYPYSRSFDDSYMNKVLVFTKQNQEKLNQTPFEAFGNDSAKWQKIEVLAKNLPTKKQKRILDKNYKDKEQKDFKDRNLNDTRYIARLVLNYTKDYLDFLPLSDDENTKLNDTQKGSKVHVEAKSGMLTSALRHTWGFSTKDRNNHLHHAIDAVIIAYANNSIVKAFSDFKKEQESNTAELYAKKISELDYKNKRKFFEPFSGFRQKVLDKIDEIFVSKPERKKPSGALHEETFRKEEEFYQSYGGKEGVLKALELGKIRKVNGKIVKNGDMFRVDIFKHKKTNKFYAVPIYTMDFALKVLPNKAVARSKKGEIKDWILMDENYEFCFSLYKDSLILIQTKDMQEPEFVYYNAFTSSTVSLIVSKHDNKFETLSKNQKILFKNANEKEVIAKSIGIQNLKVFEKYIVSALGEVTKAEFRQREEFKNELR

SEQ ID NO: 51 - protein, 1037 aa, Parvibaculum lavamentivorans
MERIFGFDIGTTSIGFSVIDYSSTQSAGNIQRLGVRIFPEARDPDGTPLNQQRRQKRMMRRQLRRRRIRRKALNETLHEAGFLPAYGSADWPVVMADEPYELRRRGLEEGLSAYEFGRAIYHLAQHRHFKGRELEESDTPDPDVDDEKEAANERAATLKALKNEQTTLGAWLARRPPSDRKRGIHAHRNVVAEEFERLWEVQSKFHPALKSEEMRARISDTIFAQRPVFWRKNTLGECRFMPGEPLCPKGSWLSQQRRMLEKLNNLAIAGGNARPLDAEERDAILSKLQQQASMSWPGVRSALKALYKQRGEPGAEKSLKFNLELGGESKLLGNALEAKLADMFGPDWPAHPRKQEIRHAVHERLWAADYGETPDKKRVIILSEKDRKAHREAAANSFVADFGITGEQAAQLQALKLPTGWEPYSIPALNLFLAELEKGERFGALVNGPDWEGWRRTNFPHRNQPTGEILDKLPSPASKEERERISQLRNPTVVRTQNELRKVVNNLIGLYGKPDRIRIEVGRDVGKSKREREEIQSGIRRNEKQRKKATEDLIKNGIANPSRDDVEKWILWKEGQERCPYTGDQIGFNALFREGRYEVEHIWPRSRSFDNSPRNKTLCRKDVNIEKGNRMPFEAFGHDEDRWSAIQIRLQGMVSAKGGTGMSPGKVKRFLAKTMPEDFAARQLNDTRYAAKQILAQLKRLWPDMGPEAPVKVEAVTGQVTAQLRKLWTLNNILADDGEKTRADHRHHAIDALTVACTHPGMTNKLSRYWQLRDDPRAEKPALTPPWDTIRADAEKAVSEIVVSHRVRKKVSGPLHKETTYGDTGTDIKTKSGTYRQFVTRKKIESLSKGELDEIRDPRIKEIVAAHVAGRGGDPKKAFPPYPCVSPGGPEIRKVRLTSKQQLNLMAQTGNGYADLGSNHHIAIYRLPDGKADFEIVSLFDASRRLAQRNPIVQRTRADGASFVMSLAAGEAIMIPEGSKKGIWIVQGVWASGQVVLERDTDADHSTTTRPMPNPILKDDAKKVSIDPIGRVRPSND

SEQ ID NO: 52 - protein, 1107 aa, Eubacterium ventriosum
MGYTVGLDIGVASVGVAVLDENDNIVEAVSNIFDEADTSNNKVRRTLREGRRTKRRQKTRIEDFKQLWETSGYIIPHKLHLNIIELRNKGLTELLSLDELYCVLLSMLKHRGISYLEDADDGEKGNAYKKGLAFNEKQLKEKMPCEIQLERMKKYGKYHGEFIIEINDEKEYQSNVFTTKAYKKELEKIFETQRCNGNKINTKFIKKYMEIYERKREYYIGPGNEKSRTDYGIYTTRTDEEGNFIDEKNIFGKLIGKCSVYPEEYRASSASYTAQEFNLLNDLNNLKINNEKLTEFQKKEIVEIIKDASSVNMRKIIKKVIDEDIEQYSGARIDKKGKEIYHTFEIYRKLKKELKTINVDIDSFTREELDKTMDILTLNTERESIVKAFDEQKFVYEENLIKKLIEFRKNNQRLFSGWHSFSYKAMLQLIPVMYKEPKEQMQLLTEMNVFKSKKEKYVNYKYIPENEVVKEIYNPVVVKSIRTTVKILNALIKKYGYPESVVIEMPRDKNSDDEKEKIDMNQKKNQEEYEKILNKIYDEKGIEITNKDYKKQKKLVLKLKLWNEQEGLCLYSGKKIAIEDLLNHPEFFEIDHIIPKSISLDDSRSNKVLVYKTENSIKENDTPYHYLTRINGKWGFDEYKANVLELRRRGKIDDKKVNNLLCMEDITKIDVVKGFINRNLNDTRYASRVVLNEMQSFFESRKYCNTKVKVIRGSLTYQMRQDLHLKKNREESYSHHAVDAMLIAFSQKGYEAYRKIQKDCYDFETGEILDKEKWNKYIDDDEFDDILYKERMNEIRKKIIEAEEKVKYNYKIDKKCNRGLCNQTIYGTREKDGKIHKISSYNIYDDKECNSLKKMINSGKGSDLLMYNNDPKTYRDMLKILETYSSEKNPFVAYNKETGDYFRKYSKNHNGPKVEKVKYYSGQINSCIDISHKYGHAKNSKKVVLVSLNPYRTDVYYDNDTGKYYLVGVKYNHIKCVGNKYVIDSETYNELLRKEGVLNSDENLEDLNSKNITYKFSLYKNDIIQYEKGGEYYTERFLSRIKEQKNLIETKPINKPNFQRKNKKGEWENTRNQIALAKTKYVGKLVTDVLGNCYIVNMEKFSLVVDK

SEQ ID NO: 53 - protein, 1136 aa, Streptococcus gordonii
MNGLVLGLDIGIASVGVGILEKDTGKIIHASSRLFPAATADNNVERRSNRQGRRLNRRKKHRSVRLQDLFEGYGLLTDFSKVSMNLNPYQLRVQGMENQLTNEELFVALKNIVKRRGISYLDDASEDGGTVSSDYGKAVEENRKLLAEKTPGQIQLERFEKYGQLRGDFTVEENGEKHRLINVFSTSAYRKEAERILRKQQEFNSKITDEFIEDYLIILTGKRKYYHGPGNEKSRTDYGRFRTDGTTLDNIFGILIGKCTFYTEEYRASKASYTAQEFNLLNDLNNLTVPTETKKLSEEQKKLIIEYAKSAKTLGASTLLKYIAKMIDASVDQIRGYRVDVNNKPEMHTFEVYRKMQSLETIKVEELPRKVLDELAHILTLNTEREGIEEAINSKLKDIFNRDQVLELVQFRKNNSSLFSKGWHNFSIKLMMELIPELYETSEEQMTILTRLGKQRSKETSKRTKYIDEKELTEEIYNPVVAKSVRQAIKIINEATKKYGIFDNIVIEMARENNEEDAKKDYIKRQKANQDEKNAAMEKAAFQYNGKKELPDNIFHGHKELTTKIRLWHQQGEKCLYTGKNIPISDLIHNQYKYEIDHILPLSLSFDDSLSNKVLVLATANQEKGQRTPFQALDSMDDAWSYREFKSYVKDSKLLSNKKKDYLLTEEDISKIEVKQKFIERNLVDTRYSSRVVLNALQDFYKSHQLDTTISVVRGQFTSQLRRKWGIEKSRETYHHHAVDALIIAASSQLRLWKKHSNPLIAYKEGQFVDSETGEIVSLSDEEYKELVFKAPYDHFVDTLRSKKFEDSILFSYQVDSKYNRKISDATIYATRKAKLDKEKKEYTYTLGKIKDIYALGTKTPSKTGFYKFLDLYKTDKSQFLMYQKDRKTWDEVIEKIIEQYRPFKEYDKNGKEVDFNPFEKYRIGNGPIRKYSKKGNGPEIKSLKYYDILLGKHKNITPDGSRNTVALLSLNPWRTDVYYNSETKKYEFLGLKYADLCFEEGGAYGISEVKYKKIREKEGIGKNSEFKFTLYKNDLILIKDTETNCQQFFRFWSRTGKDNPKSFEKHKIELKPYEKAKFEKGEELKVLGKVPPSSNQFQKNMQIENLSIYKVKTDILGNKHFIKKEGDEPKLKFKK

SEQ ID NO: 54 - protein, 984 aa, Campylobacter jejuni
MARILAFDIGISSIGWAFSENDELKDCGVRIFTKAENPKTGESLALPRRLARSARKRLARRKARLNHLKHLIANEFKLNYEDYQSFDESLAKAYKGSLISPYELRFRALNELLSKQDFARVILHIAKRRGYDDIKNNGDEEKSEILKAIKQNEEKLVNYQSVGEYLYKEYFQKFKENSKEFINVRNKKESYERCITQSFLKDELKLIFQKQREFGFSFSKKFEEEVLSVAFYKRALKDFSHLVGNCSFFTDEKRAPKNSPLAFMFVALTRIINILNNLKNTEGILYTKDDLNALLNEVLKNGTLTYKQTKKLLGLSDDYEFKGEKGTYFIEFKKYKEFIKALGEHNLSQDDLNEIAKDITLIKDEIKLKKALAKYDLNQNQIDSLSKLEFKDHLNISFKALKLITPLMLEGKKYDEACNELNLKVAINEDKKDFLPAFNETYYKDEVTNPVVLRAIKEYRKILNALLKKYGKVHKINIELAREVGKNHSQRAKIEKEQNENYKAKKDAEIECEKLGLKINSKNILKLRLFKEQKEFCAYSGEKIKLSDLQDEKMLEIDHIYPYSRSFDDSYMNKVLVFTKQNQEKLNKTPFEAFGNDSTKWQKIEVLAKNLPEKKQKRILDKNYKDKEQKDFKDRNLNDTRYIARLVLNYTKDYLDFLPLSDDENTKLNDTQKGSKVHVEAKSGMLTSALRHTWGFSAKDRNNHLHHAIDAAIIAYANNSIVKAFSDFKKEQESNSVELYAKKISELDYKNKRKFFEPFSGFRQKVLDKIDEIFVSKPERKKPSGALHEETFRKEEEFYQSYGGKEGVLKALELGKIRKVNGKIVKNGDMFRVDIFKHKKTNKFYAVPIYTMDFALKVLPNKAVARSKKGEIKDWILMDENYEFCFSLYKDSLILIQTKDMQEPELVYFNAFTSSTVSLIVSKHDNKFETLSKNQKILFKNANEKEVIAKSIGIQNLKVFEKYIVSALGEVTKAEFRQREDFKK

SEQ ID NO: 55 - protein, 1079 aa, Dinoroseobacter shibae
MRLGLDIGTSSIGWWLYETDGAGSDARITGVVDGGVRIFSDGRDPKSGASLAVDRRAARAMRRRRDRYLRRRATLMKVLAETGLMPADPAEAKALEALDPFALRAAGLDEPLPLPHLGRALFHLNQRRGFKSNRKTDRGDNESGKIKDATARLDMEMMANGARTYGEFLHKRRQKATDPRHVPSVRTRLSIANRGGPDGKEEAGYDFYPDRRHLEEEFHKLWAAQGAHHPELTETLRDLLFEKIFFQRPLKEPEVGLCLFSGHHGVPPKDPRLPKAHPLTQRRVLYETVNQLRVTADGREARPLTREERDQVIHALDNKKPTKSLSSMVLKLPALAKVLKLRDGERFTLETGVRDAIACDPLRASPAHPDRFGPRWSILDADAQWEVISRIRRVQSDAEHAALVDWLTEAHGLDRAHAEATAHAPLPDGYGRLGLTATTRILYQLTADVVTYADAVKACGWHHSDGRTGECFDRLPYYGEVLERHVIPGSYHPDDDDITRFGRITNPTVHIGLNQLRRLVNRIIETHGKPHQIVVELARDLKKSEEQKRADIKRIRDTTEAAKKRSEKLEELEIEDNGRNRMLLRLWEDLNPDDAMRRFCPYTGTRISAAMIFDGSCDVDHILPYSRTLDDSFPNRTLCLREANRQKRNQTPWQAWGDTPHWHAIAANLKNLPENKRWRFAPDAMTRFEGENGFLDRALKDTQYLARISRSYLDTLFTKGGHVWVVPGRFTEMLRRHWGLNSLLSDAGRGAVKAKNRTDHRHHAIDAAVIAATDPGLLNRISRAAGQGEAAGQSAELIARDTPPPWEGFRDDLRVRLDRIIVSHRADHGRIDHAARKQGRDSTAGQLHQETAYSIVDDIHVASRTDLLSLKPAQLLDEPGRSGQVRDPQLRKALRVATGGKTGKDFENALRYFASKPGPYQAIRRVRIIKPLQAQARVPVPAQDPIKAYQGGSNHLFEIWRLPDGEIEAQVITSFEAHTLEGEKRPHPAAKRLLRVHKGDMVALERDGRRVVGHVQKMDIANGLFIVPHNEANADTRNNDKSDPFKWIQIGARPAIASGIRRVSVDEIGRLRDGGTRPI

SEQ ID NO: 56 - protein, 1096 aa, Eubacterium dolichum
MMEVFMGRLVLGLDIGITSVGFGIIDLDESEIVDYGVRLFKEGTAAENETRRTKRGGRRLKRRRVTRREDMLHLLKQAGIISTSFHPLNNPYDVRVKGLNERLNGEELATALLHLCKHRGSSVETIEDDEAKAKEAGETKKVLSMNDQLLKSGKYVCEIQKERLRTNGHIRGHENNFKTRAYVDEAFQILSHQDLSNELKSAIITIISRKRMYYDGPGGPLSPTPYGRYTYFGQKEPIDLIEKMRGKCSLFPNEPRAPKLAYSAELFNLLNDLNNLSIEGEKLTSEQKAMILKIVHEKGKITPKQLAKEVGVSLEQIRGFRIDTKGSPLLSELTGYKMIREVLEKSNDEHLEDHVFYDEIAEILTKTKDIEGRKKQISELSSDLNEESVHQLAGLTKFTAYHSLSFKALRLINEEMLKTELNQMQSITLFGLKQNNELSVKGMKNIQADDTAILSPVAKRAQRETFKVVNRLREIYGEFDSIVVEMAREKNSEEQRKAIRERQKFFEMRNKQVADIIGDDRKINAKLREKLVLYQEQDGKTAYSLEPIDLKLLIDDPNAYEVDHIIPISISLDDSITNKVLVTHRENQEKGNLTPISAFVKGRFTKGSLAQYKAYCLKLKEKNIKTNKGYRKKVEQYLLNENDIYKYDIQKEFINRNLVDTSYASRVVLNTLTTYFKQNEIPTKVFTVKGSLTNAFRRKINLKKDRDEDYGHHAIDALIIASMPKMRLLSTIFSRYKIEDIYDESTGEVFSSGDDSMYYDDRYFAFIASLKAIKVRKFSHKIDTKPNRSVADETIYSTRVIDGKEKVVKKYKDIYDPKFTALAEDILNNAYQEKYLMALHDPQTFDQIVKVVNYYFEEMSKSEKYFTKDKKGRIKISGMNPLSLYRDEHGMLKKYSKKGDGPAITQMKYFDGVLGNHIDISAHYQVRDKKVVLQQISPYRTDFYYSKENGYKFVTIRYKDVRWSEKKKKYVIDQQDYAMKKAEKKIDDTYEFQFSMHRDELIGITKAEGEALIYPDETWHNFNFFFHAGETPEILKFTATNNDKSNKIEVKPIHCYCKMRLMPTISKKIVRIDKYATDVVGNLYKVKKNTLKFEFD

SEQ ID NO: 57 - protein, 1082 aa, Neisseria meningitidis
MAAFKPNPINYILGLDIGIASVGWAMVEIDEDENPICLIDLGVRVFERAEVPKTGDSLAMARRLARSVRRLTRRRAHRLLRARRLLKREGVLQAADFDENGLIKSLPNTPWQLRAAALDRKLTPLEWSAVLLHLIKHRGYLSQRKNEGETADKELGALLKGVADNAHALQTGDFRTPAELALNKFEKESGHIRNQRGDYSHTFSRKDLQAELNLLFEKQKEFGNPHISDGLKEGIETLLMTQRPALSGDAVQKMLGHCTFEPAEPKAAKNTYTAERFIWLTKLNNLRILEQGSERPLTDTERTTLIDEPYRKSKLTYAQARKLLELDNTAFFKGLRYGKDNAEASTLMEMKAYHAISRALEKEGLKDKKSPLNLSPELQDEIGTAFSLFKTDEDITGRLKDRVQPEILEALLKHISFDKFVQISLKALRRIVPLMEQGKRYDEACAEIYGDHYGKKNTEEKIDLPPIPADEIRNPVVLRALSQARKVINGVVRRYGSPARIHIETAREVGKSFKDRKEIEKRQEENRKDREKAATKFREYFPNFVGEPKSKDILKLRLYEQQHGKCLYSGKEINLGRLNEKGYVEIDHALPFSRTWDDSFNNKVLVLGSENQNKGNQTPYEYFNGKDNSREWQEFKARVETSRFPRSKKQRILLQKFDEEGFKERNLNDTRYVNRFLCQFVADHMLLTGKGKRRVFASNGQITNLLRGFWGLRKVRAENDRHHALDAVVVACSTVAMQQKITRFVRYKEMNAFDGKTIDKETGEVLHQKTHFPQPWEFFAQEVMIRVFGKPDGKPEFEEADTPEKLRTLLAEKLSSRPEAVHEYVTPLFVSRAPNRKMSGQGHMETVKSAKRLDEGVSVLRVPLTQLKLKDLEKMVNREREPKLYEALKARLEAHKDDPAKAFAEPFYKYDKAGNRTQQVKAVRVEQVQKTGVWVRNHNGIADNATMVRVDVFEKGDKYYLVPIYSWQVAKGILPDRAVVQGKDEEDWQLIDDSFNFKFSLHPNDLVEVITKKARMFGYFASCHRGTGNINIRIHDLDHKIGKNGILEGIGVKTALSFQKYQIDELGKEIRPCRLKKRPPVR

SEQ ID NO: 58 - protein, 1050 aa, Gluconacetobacter diazotrophicus
MGENMIDESLTFGIDLGIGSCGWAVLRRPSAFGRKGVIEGMGSWCFDVPETSKERTPTNQIRRSNRLLRRVIRRRRNRMAAIRRLLHAAGLLPSTDSDALKRPGHDPWELRARGLDKPLKPVEFAVVLGHIAKRRGFKSAAKRKATNISSDDKKMLTALEATRERLGRYRTVGEMFARDPDFASRRRNREGKYDRTTARDDLEHEVHALFAAQRRLGQGFASPELEEAFTASAFHQRPMQDSERLVGFCPFERTEKRAAKLTPSFERFRLLARLLNLRITTPDGERPLTVDEIALVTRDLGKTAKLSIKRVRTLIGLEDNQRFTTIRPEDEDRDIVARTGGAMTGTATLRKALGEALWTDMQERPEQLDAIVQVLSFFEANETITEKLREIGLTLAVLDVLLTALDAGVFAKFKGAAHISTKAARNLLPHLEQGRRYDEACTMAGYDHAASRLSHHGQIVAKTQFNALVTEIGESIANPIARKALIEGLKQIWAMRNHWGLPGSIHVELARDVGNSIEKRREIEKHIEKNTALRARERREVHDLLDLEDVNGDTLLRYRLWKEQGGKCLYTGKAIHIRQIAATDNSVQVDHILPWSRFGDDSFNNKTLCLASANQQKKRSTPYEWLSGQTGDAWNAFVQRIETNKELRGFKKRNYLLKNAKEAEEKFRSRNLNDTRYAARLFAEAVKLLYAFGERQEKGGNRRVFTRPGALTAALRQAWGVESLKKQDGKRINDDRHHALDALTVAAVDEAEIQRLTKSFHEWEQQGLGRPLRRVEPPWESFRADVEATYPEVFVARPERRRARGEGHAATIRQVKERECTPIVFERKAVSSLKEADLERIKDGERNEAIVEAIRSWIATGRPADAPPRSPRGDIITKIRLATTIKAAVPVRGGTAGRGEMVRADVFSKPNRRGKDEWYLVPVYPHQIMNRKAWPKPPMRSIVANKDEDEWTEVGPEHQFRFSLYPRSNIEIIRPSGEVIEGYFVGLHRNTGALTISAHNDPKSIHSGIGTKTLLAISKYQVDRFGRKSPVRKEVRTWHGEACISPTPPG

SEQ ID NO: 59 - protein, 1391 aa, Kordia algicida
MKKILGLDLGTNSIGWALVNEAEHEHEQSSIVKLGVRVNPLSVDEKTNFEKGRPLSINADRTSKRSARRNLQRFKLRRKNLINLLLKHHIISNETILTEVGKNTTHQTLKLRSKATQEKISLEEFARILLSINKKRGYKSSRKEKNEDEGFTIDGMAIAKELYDNQLTPGQYVYNILQDGKNYIPDFYRSDLQAEFDDVWQFQKKFYSSILTDEFYLKLKGQGKENTRKLFLAIHQVYTAENKGKRDAVKLQYYKWRSEAVKKQLSIEEVAYVLVEINNNINKSSGYLGAISDRSKALYFNNETVGEYLYGQLVKNRHNSLRNQVFYRQDYLDEFEKIWETQAKFYDELTNELKQEIRDVVIFYQRKLKSQKHLISDCLFEKHHKAIPKSSPLFQEFKIWQNLNYLEFVHTQSKEKIFFSELDDETRQFVFAELNIRGTLKIKEIKKLIGLETPVYWKSNFDEIEGNRTNQVLYNVYQNIADDLGYGFDWSKKHAFEINAELQAIFKDVGIDTAILNFDASIEENDFDKQKSYQLWHLLYSAEDTDKATEEDKLIYGNINTKLKKQLHQKYGFEAKYGNLLANISLQQDYGNLSAKAIKKILPYLESGNSFYEACTIVGYNPSNSLTKEQQQNRKLKDKLELLPKNSLRNPVVEKILNQKVNLINQLIDEYGKPDEVRIELARELKKSAKQRADLSKHINDATLKNQNIRKTLQKDFGIQNPSKNDVIRYKLYDELKDNGYKTLFTNKYIPKEQLFSKDVDIEHIIPKAILFDDSFSNKTLAYRNVNLAKADATAFDFISSKHLDDLDNYKARVETLFQSKRISKGKYKKLLMTRQNLPEDFIERDLRNSQYIAKKATAMLKEVFRSVVPTSGRITDKLREDWDLVNVMKELNLPKYRTLGLTEFIERKNGNKIEQIIDWTKRNDHRHHAMDALTVAFTTHNHIQYLNNLNVTHGLNGVDTDHEKSRLYAIKQAITKVYIVGKTKKRKFIPPMENFRSHAKNHLEGILISFKNKNKVVTKNKNRTKTKTKGVFNEKIQLTPRGQLHKETIYGHAKKVIVTKEKVSSKFTHEKILQVTKPAYREALLKRLASFKNDPKKAFSGKNALSKNPLYFDITSGKKVPDTVKLSYFENSYVIRKEVNSDNFKNEKSLQKVLDVGIRRILEKRLADYNGNAKEAFSNLEKNPIWKDKEKGVCIKKVRIEALKNAEPLHVKKDHLGKIILDDENKSTPVDFISTGNNHHVAIYEDKDGKLHDKVVSFYEVVSRVNLGLPIIDKSFNSHLDWKFLFSMKQNEMFVFPSEDFNPKEIDIGNPKNNELISKYLFRVQKFSKVTYGNSAVRDYVFRHHLETELIDKKELKGITYYQLKSIGMLEKLVKVRINHIGKIVHIGEY

SEQ ID NO: 60 - protein, 1116 aa, Clostridium spiroforme
MVEFLLKEMKIMGRLVLGLDIGITSVGYGVIDIDKNEFVDYGVRLFKEGTAINNEERRSKRGARRLKRRKTNRIADMKKLLERNGLIDEQYTALNNPYEIRKKGLKNKLSNYELATAILHITKNRGTCLESNADETQDEESTKNILSKNALELKDKYICEIQLARLEESGKIRGINNNFKTEDYLKELSKILENQDLEKETIDKIKEIVARRRRYDQGPGSEKSPTPYGSYRMENGELVHVNLIDMMRGKCSVFPDQLRAPQQSYSAELFNLLNDLNNLKINGEKLSSTEKQKIIDFVNEKGGITVKQLLKLIDVGITEISGFRIDKNEKPLITEFKGYKKVLKVFKNYNQESLLNDKSIVDTIMDINTKIKSIDERSDQLKQVLPSLDTSIINDLASIKGVSGYHSLSLKALNLINNEMLKTEMNQMQVLHQLDIFDKNRVSLKGQRQIYADDNAILSPVAKRAHRETFKVINKLRSIYGEFDSIVIETTRDKNTQDQKKRIKNNQKNYEERNTEVNNFLKEAGYNPENINAKTKMKIRLYIEQDAKSAYTLQDINLKELIEDEKAYEIDHIIPISISLDDSFNNKVLTTHDENQEKGNLTPISAFLKGKFHNGNLNTYKVFIQNNKNLNRKKKEYLLCEDDITRYEVVQNFINRNLVDTSYACRTVMNTLVHYFKDNEINTKVHTIKGQATSTFRKRIGLIKDREEDYFHHAIDALIVASLKKMNLINSYLMKVDFNEMYDEETGEIFNVLPDNSYLDEKYISFVSNLKNIYEESNKYIRGVMIKEKMTYPLIKVSHKIDTKPNRKISDDTIYSTRNVDNQDMLVERIKNIYDPKENAANTLINDIINDNTDKYIMYHKDPQTFDKIKAIVLNHFNEFKTDKNCYIVTKEGLYKLKGTSPLALYYEEFGPITKYAKKNNGPTIHSMKFYSEKLGNHLSITHKYSTVNKKVITKQISPYRTDFYQSPEGKYKFVTVRYKDVAYNAKKDKYIIDHSWYREQKKLKKIADEWIFVCSVHRDELIGIMKADGQKRIFDSSTESDGETLYHDAKTYEILKFTATNNDITGRFEVKPIYCYCKKQLMVSIGTCRKIQKFATDVLGNLYIVKDNVLKLEFK

SEQ ID NO: 61 - protein, 1348 aa, Finegoldia magna
MKSEKKYYIGLDVGTNSVGWAVTDEFYNILRAKGKDLWGVRLFEKADTAANTRIFRSGRRRNDRKGMRLQILREIFEDEIKKVDKDFYDRLDESKFWAEDKKVSGKYSLFNDKNFSDKQYFEKFPTIFHLRKYLMEEHGKVDIRYYFLAINQMMKRRGHFLIDGQISHVTDDKPLKEQLILLINDLLKIELEEELMDSIFEILADVNEKRTDKKNNLKELIKGQDFNKQEGNILNSIFESIVTGKAKIKNIISDEDILEKIKEDNKEDFVLTGDSYEENLQYFEEVLQENITLFNTLKSTYDFLILQSILKGKSTLSDAQVERYDEHKKDLEILKKVIKKYDEDGKLFKQVFKEDNGNGYVSYIGYYLNKNKKITAKKKISNIEFTKYVKGILEKQCDCEDEDVKYLLGKIEQENFLLKQISSINSVIPHQIHLFELDKILENLAKNYPSFNNKKEEFTKIEKIRKTFTFRIPYYVGPLNDYHKNNGGNAWIFRNKGEKIRPWNFEKIVDLHKSEEEFIKRMLNQCTYLPEETVLPKSSILYSEYMVLNELNNLRINGKPLDTDVKLKLIEELFKKKTKVTLKSIRDYMVRNNFADKEDFDNSEKNLEIASNMKSYIDFNNILEDKFDVEMVEDLIEKITIHTGNKKLLKKYIEETYPDLSSSQIQKIINLKYKDWGRLSRKLLDGIKGTKKETEKTDTVINFLRNSSDNLMQIIGSQNYSFNEYIDKLRKKYIPQEISYEVVENLYVSPSVKKMIWQVIRVTEEITKVMGYDPDKIFIEMAKSEEEKKTTISRKNKLLDLYKAIKKDERDSQYEKLLTGLNKLDDSDLRSRKLYLYYTQMGRDMYTGEKIDLDKLFDSTHYDKDHIIPQSMKKDDSIINNLVLVNKNANQTTKGNIYPVPSSIRNNPKIYNYWKYLMEKEFISKEKYNRLIRNTPLTNEELGGFINRQLVETRQSTKAIKELFEKFYQKSKIIPVKASLASDLRKDMNTLKSREVNDLHHAHDAFLNIVAGDVWNREFTSNPINYVKENREGDKVKYSLSKDFTRPRKSKGKVIWTPEKGRKLIVDTLNKPSVLISNESHVKKGELFNATIAGKKDYKKGKIYLPLKKDDRLQDVSKYGGYKAINGAFFFLVEHTKSKKRIRSIELFPLHLLSKFYEDKNTVLDYAINVLQLQDPKIIIDKINYRTEIIIDNFSYLISTKSNDGSITVKPNEQMYWRVDEISNLKKIENKYKKDAILTEEDRKIMESYIDKIYQQFKAGKYKNRRTTDTIIEKYEIIDLDTLDNKQLYQLLVAFISLSYKTSNNAVDFTVIGLGTECGKPRITNLPDNTYLVYKSITGIYEKRIRIK

SEQ ID NO: 62 - protein, 1129 aa, Streptococcus infantarius
MSNGKILGLDIGVASVGVGIIDSKTGNVIHANSRLFSAANAENNAERRGFRGARRLTRRKKHRVKRVRDLFEKYDISTDFRNLNLNPYELRVKGLTEQLTNEELFAALRTIAKRRGISYLDDAEDDSTGSSDYAKSIDENRRLLKTKTPGQIQLERLEKYGQLRGNFTVYDENGEAHRLINVFSTSDYKNEARKILETQSNYNKQITDEFIEDYIEILTQKRKYYHGPGNEKSRTDYGRFRTDGTTLENIFGILIGKCSFYPEEYRASKASYTAQEFNFLNDLNNLKVPTETGKLSTEQKEYLVDFAKKSKALGASKLLKEIAKIVDCSVDDIKGYRVDNKDKPDLHTFEPYRKLKFNLSSIDIDELSRETLDKLADILTLNTEREGIEDAIKRNLPSQFTEEQISEIVQIRKNQSSAFNKGWHSFSAKLMNELIPELYVTSEEQMTILTRLEKFKVNKKSSKNTKTIDEKEITDEIYNPVVAKSVRQTIKIINAAVKKYGDFDKIVIEMPRDKNAEDEKKFIDKKQKENKKEKDDSLKRAAFLYNGTDNLPDGVFHGNKELKTKIRLWYQQGERCLYSGKLISIHDLVHNSNKFEIDHILPLSLSFDDSLANKVLVYAWTNQEKGQKTPYQVIDSMDTAWSFREMKDYVLKQKGLGKKKCEYLLTTENIDKIEVKKKFIERNLVDTRYASRVVLNSLQTALKELGKDTKVSVVRGQFTSQLRRKWNIDKSRETYHHHAVDALIIAASSQLKLWQKQENPMFESYGENQVVNKETGEILSISDDKYKELVFQPPYQGFVNTISSKGFEDEILFSYQVDSKFNRKVSDATIYSTRKAKLGKDKKDETYVLGKIKDIYSQDGFDTFIKRYKKDKTQFLMYQKDPLTWENVIEVILRDYPSEKLSEDGKKTVKCNPFEEYRRENGLICKYSKKGNGTPIKSLKYYDKKLGNCIDITPEKSKNRVVLRQISPWRADIYFNLETLKYELMGLKYSDLSFEKGTGKYHISQEKYDAIREKEGIGKKSEFKFTLYRNDLILIKDTLNNCERMLRFGSKNDTSKHYVELKPLEKGTFDSEEEILPVLGKVAKSGQFIKGLNKPNISIYKVRTDVLGNKFFIKKEGDKPKLDFKNNNK

SEQ ID NO: 63 - protein, 1065 aa, Clostridium perfringens
MNKDINYALGLDIGITSVGWAVINLDLNRIEDLGVRIFNAAENLKDGSSLALPRRLARGRRRLLRRKAYRVERVRKLILKNNILTKEELEGLFKNKEVIDVWEARVKGLDYKLSREEWAKILINFCKRRGFKSNRKNEAKDKEAGQILSSISYNIEKMKETNSRTIGEYIYNEVKNSEDSYAPLRNKFGEYKMCVSRDVIREEIHTLFEKQRELGNNFASDEIEDKYFEIFNSQRPFSNFEDLEKLVGFCTFERKKHKRAPKHCISSEEFTLYEGINKLSIIKDGEKRKLSEEERTLVVNEAFNKKEIKYTTLRKLLGLSEEELFSTLTYSIDKDISKTENTKFVSLKGYHEIKRAIEKGVSKKAWQDIENNRNLLNDIAYVLTLGKTDDEIEKQLRLRNVPEELFESLLDMSFNKFNNLSIYALEKILPFMKEGYQYNEACEKAGYNFKAIYEGVRTKKLPVIEIDEIVNPVVNRALAQTRKVINSVIDKYGSPVRINIELARDLAKNFKDRKLIEKEQKENRANLDKIRENLRELMDKEPTVVEVLKYRLWEQQRGECAYTQSQIPLERLFSPGYCEIDHIIPFSRSFDDSLSNKILVLGSENQRKGNRTPYEYFGEDSERWNSFEIWVKGSYLNYKKKANLLKKKFSEEEQRDWKARNLQDTKYICRYISNFVNNRLEFKESENKQKVITVNGRATAYLRSRWGLNKVREDGDKHHALDAAVVGVTTQGMVQKISKYSKAHELYTVRKNDEFVDVETGECVDVDEYKEIRKDILPRPWRGFSEELKLRLSDNPLEELKKSPIETYNEEFIKENVKPIFVSRVPFRKISGKLFKETIYSERAFKDGYFVSKKSLVDLKRGDLDNFYNYECDKKLYDAISERMKEFNYNGKKAFESPFRKPTKSGKEGPVVRSVKIKSAVPFKDGIPMNEGLVAKEGMVRIDIYEKEGKYFVVPVYRYQLAKGIVPKRAAIAKKDELKWPIMDQTYNFKFSIYKNDLIEVKYDKKGVYFGYYDGFDRNSASLTIEKHDNSERYRSIGLKVGVLEINKYEVDVLGNYHKVKLGGN

SEQ ID NO: 64 - protein, 1195 aa, Elusimicrobium minutum
MQKNINTKQNHIYIKQAQKIKEKLGDKPYRIGLDLGVGSIGFAIVSMEENDGNVLLPKEIIMVGSRIFKASAGAADRKLSRGQRNNHRHTRERMRYLWKVLAEQKLALPVPADLDRKENSSEGETSAKRFLGDVLQKDIYELRVKSLDERLSLQELGYVLYHIAGHRGSSAIRTFENDSEEAQKENTENKKIAGNIKRLMAKKNYRTYGEYLYKEFFENKEKHKREKISNAANNHKFSPTRDLVIKEAEAILKKQAGKDGFHKELTEEYIEKLTKAIGYESEKLIPESGFCPYLKDEKRLPASHKLNEERRLWETLNNARYSDPIVDIVTGEITGYYEKQFTKEQKQKLFDYLLTGSELTPAQTKKLLGLKNTNFEDIILQGRDKKAQKIKGYKLIKLESMPFWARLSEAQQDSFLYDWNSCPDEKLLTEKLSNEYHLTEEEIDNAFNEIVLSSSYAPLGKSAMLIILEKIKNDLSYTEAVEEALKEGKLTKEKQAIKDRLPYYGAVLQESTQKIIAKGFSPQFKDKGYKTPHTNKYELEYGRIANPVVHQTLNELRKLVNEIIDILGKKPCEIGLETARELKKSAEDRSKLSREQNDNESNRNRIYEIYIRPQQQVIITRRENPRNYILKFELLEEQKSQCPFCGGQISPNDIINNQADIEHLFPIAESEDNGRNNLVISHSACNADKAKRSPWAAFASAAKDSKYDYNRILSNVKENIPHKAWRFNQGAFEKFIENKPMAARFKTDNSYISKVAHKYLACLFEKPNIICVKGSLTAQLRMAWGLQGLMIPFAKQLITEKESESFNKDVNSNKKIRLDNRHHALDAIVIAYASRGYGNLLNKMAGKDYKINYSERNWLSKILLPPNNIVWENIDADLESFESSVKTALKNAFISVKHDHSDNGELVKGTMYKIFYSERGYTLTTYKKLSALKLTDPQKKKTPKDFLETALLKFKGRESEMKNEKIKSAIENNKRLFDVIQDNLEKAKKLLEEENEKSKAEGKKEKNINDASIYQKAISLSGDKYVQLSKKEPGKFFAISKPTPTTTGYGYDTGDSLCVDLYYDNKGKLCGEIIRKIDAQQKNPLKYKEQGFTLFERIYGGDILEVDFDIHSDKNSFRNNTGSAPENRVFIKVGTFTEITNNNIQIWFGNIIKSTGGQDDSFTINSMQQYNPRKLILSSCGFIKYRSPILKNKEG

SEQ ID NO: 65 - protein, 1101 aa, Akkermansia muciniphila
MSRSLTFSFDIGYASIGWAVIASASHDDADPSVCGCGTVLFPKDDCQAFKRREYRRLRRNIRSRRVRIERIGRLLVQAQIITPEMKETSGHPAPFYLASEALKGHRTLAPIELWHVLRWYAHNRGYDNNASWSNSLSEDGGNGEDTERVKHAQDLMDKHGTATMAETICRELKLEEGKADAPMEVSTPAYKNLNTAFPRLIVEKEVRRILELSAPLIPGLTAEIIELIAQHHPLTTEQRGVLLQHGIKLARRYRGSLLFGQLIPRFDNRIISRCPVTWAQVYEAELKKGNSEQSARERAEKLSKVPTANCPEFYEYRMARILCNIRADGEPLSAEIRRELMNQARQEGKLTKASLEKAISSRLGKETETNVSNYFTLHPDSEEALYLNPAVEVLQRSGIGQILSPSVYRIAANRLRRGKSVTPNYLLNLLKSRGESGEALEKKIEKESKKKEADYADTPLKPKYATGRAPYARTVLKKVVEEILDGEDPTRPARGEAHPDGELKAHDGCLYCLLDTDSSVNQHQKERRLDTMTNNHLVRHRMLILDRLLKDLIQDFADGQKDRISRVCVEVGKELTTFSAMDSKKIQRELTLRQKSHTDAVNRLKRKLPGKALSANLIRKCRIAMDMNWTCPFTGATYGDHELENLELEHIVPHSFRQSNALSSLVLTWPGVNRMKGQRTGYDFVEQEQENPVPDKPNLHICSLNNYRELVEKLDDKKGHEDDRRRKKKRKALLMVRGLSHKHQSQNHEAMKEIGMTEGMMTQSSHLMKLACKSIKTSLPDAHIDMIPGAVTAEVRKAWDVFGVFKELCPEAADPDSGKILKENLRSLTHLHHALDACVLGLIPYIIPAHHNGLLRRVLAMRRIPEKLIPQVRPVANQRHYVLNDDGRMMLRDLSASLKENIREQLMEQRVIQHVPADMGGALLKETMQRVLSVDGSGEDAMVSLSKKKDGKKEKNQVKASKLVGVFPEGPSKLKALKAAIEIDGNYGVALDPKPVVIRHIKVFKRIMALKEQNGGKPVRILKKGMLIHLTSSKDPKHAGVWRIESIQDSKGGVKLDLQRAHCAVPKNKTHECNWREVDLISLLKKYQMKRYPTSYTGTPR

SEQ ID NO: 66 - protein, 1187 aa, Bifidobacterium longum
MLSRQLLGASHLARPVSYSYNVQDNDVHCSYGERCFMRGKRYRIGIDVGLNSVGLAAVEVSDENSPVRLLNAQSVIHDGGVDPQKNKEAITRKNMSGVARRTRRMRRRKRERLHKLDMLLGKFGYPVIEPESLDKPFEEWHVRAELATRYIEDDELRRESISIALRHMARHRGWRNPYRQVDSLISDNPYSKQYGELKEKAKAYNDDATAAEEESTPAQLVVAMLDAGYAEAPRLRWRTGSKKPDAEGYLPVRLMQEDNANELKQIFRVQRVPADEWKPLFRSVFYAVSPKGSAEQRVGQDPLAPEQARALKASLAFQEYRIANVITNLRIKDASAELRKLTVDEKQSIYDQLVSPSSEDITWSDLCDFLGFKRSQLKGVGSLTEDGEERISSRPPRLTSVQRIYESDNKIRKPLVAWWKSASDNEHEAMIRLLSNTVDIDKVREDVAYASAIEFIDGLDDDALTKLDSVDLPSGRAAYSVETLQKLTRQMLTTDDDLHEARKTLFNVTDSWRPPADPIGEPLGNPSVDRVLKNVNRYLMNCQQRWGNPVSVNIEHVRSSFSSVAFARKDKREYEKNNEKRSIFRSSLSEQLRADEQMEKVRESDLRRLEAIQRQNGQCLYCGRTITFRTCEMDHIVPRKGVGSTNTRTNFAAVCAECNRMKSNTPFAIWARSEDAQTRGVSLAEAKKRVTMFTFNPKSYAPREVKAFKQAVIARLQQTEDDAAIDNRSIESVAWMADELHRRIDWYFNAKQYVNSASIDDAEAETMKTTVSVFQGRVTASARRAAGIEGKIHFIGQQSKTRLDRRHHAVDASVIAMMNTAAAQTLMERESLRESQRLIGLMPGERSWKEYPYEGTSRYESFHLWLDNMDVLLELLNDALDNDRIAVMQSQRYVLGNSIAHDATIHPLEKVPLGSAMSADLIRRASTPALWCALTRLPDYDEKEGLPEDSHREIRVHDTRYSADDEMGFFASQAAQIAVQEGSADIGSAIHHARVYRCWKTNAKGVRKYFYGMIRVFQTDLLRACHDDLFTVPLPPQSISMRYGEPRVVQALQSGNAQYLGSLVVGDEIEMDFSSLDVDGQIGEYLQFFSQFSGGNLAWKHWVVDGFFNQTQLRIRPRYLAAEGLAKAFSDDVVPDGVQKIVTKQGWLPPVNTASKTAVRIVRRNAFGEPRLSSAHHMPCSWQWRHE

SEQ ID NO: 67 - protein, 166 aa, uncultured Termite
MNKVQEIEYKKIREKLADREYRIGLDLGVGSIGYVVVSLKECNDLSYLPEDIILSGSRIFKSSIGAVERREFRLQRNSHRHHRERMRFLWQLLAEKQLALQSSKDLEKKENSADCETSQKRFPINILKEDPYILRYKALEEKLSLFQLGYVLYHIANHSNTAYENT

SEQ ID NO: 68 - protein, 1032 aa, uncultured Termite
MLYHIANHRGTDSVRSFLEYDDDKIKENTLTAKIAKETKKVIDAKKYRTFGEYLYKGKIEKFQQNIRKKVSNRKTPANKNKEFAVTRDVIIKETEKILASQKQYYTYILTDEYIKKIKDAISYQTEKLIPESGYCPYFKDEKRLPRSHKLNEYRRMYEALNNAKYFDPVLDENTGEILSYQEKEFSREEKKILFDEVLLKGMELTESGAKKLLYHLPDGCEVQLQGRDKTTQKIKGYALVDLEASPFWLRLSQQQQDEFLYDWNSLPLEKLKPKLTNYYSLTESEVDETFQEIKLPSNYASVGKKAMEILLTYIKDGCSYTEALEKAVSEGKLKVDKQTMIYDSLPYYGKILKESTQKLIGKAFSKQFADRNYKEPDTNKNEREFGKIANPVVHQTLNELRKLINEIITVFGKKPLEIGLETTRELKKSKKNREYLSKQQNKNEYARNRIYKEYIEPHLSQIKSRQENPSKYISKFELLEEQNFICPFCSEKITPDDIINSKVDVEHIFPIEESEDITKNNLVIAHNECNADKGKKSPFDAFGDKTSGKYRWNCILHNAQKNLPHKVWRFYQGSLEKFLENKPMSRRFGTDNSYISKIAARYLACLFNDPYHSEIFCIKSSLIAQLRIAWDLNSIMVPLVKNILSEKELEEFKISKNKKIRIDNRHHALDAIVIAYANRGYHNFLNRIHAKEYKINYREKSWLSKILLPPLNRDLEDFKISVKDSIEKANVSIKHDHNTNGSLVKATAYKVYYSGAGEYIITTSKNVEEISFKEKEDPKDTLYRALCKFECRDIDIKDEKLIKKLKYNSTLYKKVQNNLSKAKQELEQDNKKTEEEGKKSQKITEVRIYKKACSLVKGQYIQCGSRLKDKFFAVKEPTEIKTGLGYDTGDNLFLDLYYDKTGKLCGEIIRKVNFNRNKPNYQKEGYTLFERIYQSDILEVDTSEDRISLKNKTGSAPSDRTFIKVNTFTEVNAYFDGKRDKIQIFFGNLLKSSFKNDSFFISSMQKYNVRKVILTSLGIIKYRSQILKNKEV

SEQ ID NO: 69 - protein, 1032 aa, uncultured Termite
MKKRILGLDIGIASVGWALVEFDDEFQDNKKKGTIIKSGVRIFTRAETPKERESLAKPRREARSQRRRIRRRVERLNSIRELFVKNGVVEEWSVSKKNPNNIYITLNQIKTPWQLRMESLDRKLTNEQFAVVLTHLAKHRGYKSLRKDDKAGKVLEAISQNKKRLNDSDYRTLGEMFCKNESYKEHKRNKGGEYINSVARELIEEEVEKIFVKQREKGNNFADVNTEREYLKIAFSQKPAGSISKMVGFCTFENGEKRAPRDSYSAELFKVLCTINNTTFTDMKTGEIRSFSKEEIGKTLETVKNVKDVKYAKIRKDLGLEDSVKFSGVDYRENAKSKGEGEIFVSMKTYHEIKSKIEKLSKEKWDNLKGNTELLDSIVNIIANLKDDESIKKEFQKLKIDEDIIDVLLNFEFKKFINLSFKALRKIIPFQFQGQKYITASTSAGYSLKQEGIKNKLVPPAKENINVAVVARAFAQTRKVINAVIRKYGQFDQINIELATELKNSKFDRSKIEEGQKKFQSQKDKIFKEVQELRGGMTPSSSLLLKYRLWREQDERCVYSGRKISFEDLLDTGFLDIDHIIPYSKSMDDSFNNKVLCLAEENRNKKNDIPFNYYQRIDRDWNLLISIITSMKNMKIAKKSRLLKQELSDIEGFIERNINDTRYATRYIKDFLENNLEFKENEFIKVKVQARSGGLTSVLSYNWGMSKDREESYFHHAKDAIIVACSTQGMVQYISKISQQYENDKDKMKKIKDKTENCIPKPWDSFRADVEESIEGIFVSFAPRHKVTGSAHKETIYSKKHLEKERYVTVKKSLDKIKLSDLENIPCNENCGIIRVLKERLEKFKNDSLKAFADPVHMPTKCPNKKGPVIRSVKIKESNKTGIEVRKGLAERGEMVRVDVFIKDKKYYLVPIYVSDFKNKDLPNKAIAALKLENEWIMIDKTYSFKFSLFKDDLIKIKKKKEEIFGYFGGVHRSTGTIKIKSRHKPKEIDEGIGSRCLLDFRKFQVDVLGNYTEVKHEKRMPAYITRKDKKH

SEQ ID NO: 70 - protein, 1361 aa, Lactobacillus casei
MTKLGKPYGIGVDIGSNSIGFAAVDENSHLIRLKGKTVIGARLFEEGKAAADRRASRTTRRRLSRNRWRLSFLRDFFESHITPTGPNFFMRQKYSEISPKDKARYKYEKRLFNDRTDAEFYQQYPTMYHLRNRLLTDPSKADVREIYFAIHHILKSRGHFLTSGYAKDFNTNKVALNEIFPALQDAYAQVYPDLDITFDENKVNEFKTVLLNEKATPSDTQRALVNLLLAEDGDKDILKQQKQVLTEFAKAVVGLKTKLNVALGTEVDSSEATVWNFSLGQLDDKWAGIESAMTDEGTEILDQIRDLYRARLLNGIVPAGKTLSQAKVDDYAQHHEDLELFKDYLKQLEDDGTAKAIRQLYDRYIDGDDAKPFVREDFVKALTKEVTAHPNAKSPELLERLAQPDFMLKQRNKANGAIPVQMQQRELDQIIKNQSVYYDWLAAPNPVEKHRKSMPYQLDELLNFRIPYYVGPLVTAKEQKAAQGGVFAWMVRKDPDGNITPYNFDEKVDREASANTFIQRMKTTDTYLIGEDVLPKQSLLYQRYEVLNELNNVRVNNEKLSIEQKQQVIRELFERHNSVTIKQFAENLRAHGDYAHIPEIRGLADEKRFLSSLSTYRQLKSLLPDAIDDPAKQADIENIIAWSTVFEDAAIFKTKLKEINWLDSQTITKLSNIRYRGWGQFSHKFLNGLTLGNGHTIIQELFLSNNNLMQILTDETLQKKMTELNADKLKAANINDAIDDAYTSPSNKKALRQVLRVIEDIKRAADGQDPSWLYVETADGGGTPGKRTRARQHQLQEIYANAAHELIDSAVRGELEDKIADKADFNDRLVLYFMQGGRDIYTGTPLNIDQLSSYDIDHILPQSLIKDNSLDNRVLVHAIINREKNATFASTIYAQKMNATWRQWHEAGLISGRKLRNLQMRPDQIDKYASGFVARQLVETRQIIKLTEQIVAAQYPETKIIAVKAGLSHQLREELEFPKNRDVNHYHHAFDAFLAARIGTYLLKRFPNLQAFFTYGKFKKADVKKLRGFNFIRDITHAEDKIVVKDTGEVIWDKKRDVDELDRIYNFKRMLITHEVHFEKADLFKQTVYGAKDSKEAGGKKQLISKKKGYPVDIYGGYTQETGSYLSVVRLTKKAMYAVVKVSTRDAAKLAVAKSISEQKENETLNDIIDEKLSKISKNGKITHELFEVVLPRVGQKTLFKNSKYNLFLVNSDTYMHNYQELWMPREYQKMWKDISLSKYGDAQTEDQLDQIFGFIVSQVNSYFNLYDINQFRKKLNDAADKFATLPMRDTDDMQGKIATIGQLLIGLQANAARSDLRNLDIKTPLGLLQIPNGISLDSDTSVVYQSPTGLLEREVHLSDL

SEQ ID NO: 71 - protein, 1348 aa, Streptococcus equi
MKKPYTIALDIGTNSVGWVVVTDDYRVPTKKMKVLGNTERKTIKKNLIGALLFDSGDTAEGTRLKRTARRRYTRRKNRLRYLKEIFTEEMAKVDDGFFQRLEDSFYVLEDKEGNKHPIFANLADEVAYHKKYPTIYHLRKELVDNPQKADLRLIYLAVAHIIKFRGHFLIEGTLSSKNNNLQKSFDHLVDTYNLLFEEQRLLTEGINAKELLSAALSKSKRLENLISLIPGQKKTGIFGNIIALSLGLTPNFKANFGLSKDVKLQLAKDTYADDLDSLLAQIGDQYADLFLAAKNLSDAILLSDILTESDEITRAPLSASMVKRYREHHKDLVTLKTLIKDQLPEKYQEIFLDKTKNGYAGYIEGQVSQEEFYKYLKPILARLDGSEPLLLKIDREDFLRKQRTFDNGSIPHQIHLEELHAILRRQEVFYPFLKDNRKKIESLLTFRIPYYVGPLARGHSRFAWVKRKFDGAIRPWNFEEIVDEEASAQIFIEKMTKNDLYLPNEKVLPKHSLLYETFTVYNELTKVKYATEGMTRPQFLSADQKQAIVDLLFKTNRKVTVKQLKENYFKKIECWDSVEITGVEDSFNASLGTYHDLLKIIQDKDFLDNPDNQKIIEDIILTLTLFEDKKMISKRLDQYAHLFDKVVLNKLERHHYTGWGRLSGKLINGIRDKQSGKTILDFLKADGFANRNFMQLIHDSELSFIDEIAKAQVIGKTEYSKDLVGNLAGSPAIKKGISQTIKIVDELVKIMGYLPQQIVIEMARENQTTAQGIKNARQRMRKLEETAKKLGSNILKEHPVDNSQLQNDKRYLYYLQNGKDMYTGDDLDIDYLSSYDIDHIIPQSFIKNNSIDNKVLTSQGANRGKLDNVPSEAIVRKMKGYWQSLLRAGAISKQKFDNLTKAERGGLTQVDKAGFIQRQLVETRQITKHVAQILDSRFNTEFDDHNKRIRKVHIITLKSKLVSDFRKEFGLYKIRDINHYHHAHDAYLNAVVAKAILGKYPQLAPEFVYGDYPKYNSFKERQKATQKMLFYSNILKFFKDQESLHVNSDGEEIWNANKHLPIIKNVLSIPQVNIVKKTEVQTGGFYKESILSKGNSDKLIPRKNNWDTRKYGGFDSPTVAYSVLVIAKMEKGKAKVLKPVKEMVGITIMERTAFEENPVVFLEARGYREIQEHLIIKLPKYSLFELENGRRRLLASASELQKGNELFLPVDYMTFLYLAAHYHELTGSSEDVLRKKYFVDRHLHYFDDIIQMINDFAERHILASSNLEKINHTYHNNSDLPVNERAENIINVFTFVALGAPAAFKFFDATIDRKRYTSTKEVLNATLIHQSVTGLYETRIDLSQLGEN

SEQ ID NO: 72 - protein, 1341 aa, Ruminococcus lactaris
MGKGYYVGLDMGTGSVGWAVTDESYQILRRHGKAMWGVRLFESAKTAEERRMFRTGRRRLDRRGWRIEILQEIFAEEISRVDPGFFLRMKESKYYPEDKRDIQGNCPELPYTLFVDKTFTDKDFHKKYPTIYHLRKMLMETEDTPDMRLVYLALHHMMKHRGHFLLSGDISQVTEFKNTFNQFIENIRNEEMDFEIELDESAVQMIEETLKDKNLTRSAKKSKLVKGLNAKNVRDKAFLTLLSGGTVKLSDLFGMEELNEGERPKISFADNGYEEYAAVVEMELGELYYIVESAKAVYDWAILSDILGGSTSVSDAKVRAYEKHKADLKYLKAVVKEYFPKEVYNAVFVESSDKLNNYPAYIGMTKKNGKKVSLEGKRCSREEFMDFLKKNIVVKLPDEEAKMYLQSELEKDSFLPKQVNKDNGVIPYQVHKYELKKILDNLGDKIPFLKENAEKIEKLFSFRIPYYVGPLRTGNGENSKFAWAERKSTEKIYPWNFENVIDVEQSAENFIRRMTNKCTYLIGEDVLPKDSLLYSKFMVLNELNNLRLDGQKISVELKQKIYRDVFCRSRKVTQKKLKSYLIREGIAGKNVELTGIDGDFKGSLTAYHDFKEKLIDVELTQKEKEEIILNIVLFGDDKKLLKQRLKKKFPQLTEKQINTVTALSYKGWGRLSKKLLEEVTVPAPETGEVWNIITALWETNDNFMQLLSKEYQFSDRIEEFNEEKADPEVSYQTIEDLYVSPAVKRQIWQTLQIIQEIEKVMGEKPKRVFVEMAREKQENKRTESRKKTLSDLYTKCKKEEPEWIEALCTSLEKHEEHQLRSDKLYLYYTQKGRCMYSGEPIDLEDLWDNTKYDIDHIYPQSKTMDDSLKNRVLVKKEYNAKKSDTYPIAADIQKKMMPFWKSLLTGGFIPKEKYDRLVRNNPLDANELAGFIERQIVETRQSTKAVAEILKKILPDTEIVYVKAKTVSKFRQDFDFIKVRDMNDLHHAKDAYLNIVVGNVYFVKFTKNAAWFVKENPGRTYNLEKMFIWDVARDGEIAWKAGKSGSIVQVRAMMEKNHILVTRRSYEVKGGLFDQQILKKGKGQVPVKESDERLRDIGKYGGYNKAAGVYFMLVSSKDKKGKEQRTIEFVPIYLKDRVEKDMESARNYLMEERGLREPKILIKKIKIDTLFKVDGFYMWLSGRTSNQLIFKGANQLILSKEDMKTLKKVVKYIQRQKEDKNVKISMRDGITEEELLKLYETFLDKIRHSIYGARLSSQEKTLVNGKEKFIDLSVEAKCQVLYEILHLFQCQSGAANLKMIGGPASAGILVMNNNISKCKNISIVNQSPTGIYEKEIDLLRV

SEQ ID NO: 73 - protein, 1003 aa, Gluconacetobacter diazotrophicus
MIDESLTFGIDLGIGSCGWAVLRRPSAFGRKGVIEGMGSWCFDVPETSKERTPTNQIRRSNRLLRRVIRRRRNRMAAIRRLLHAAGLLPSTDSDALKRPGHDPWELRARGLDKPLKPVEFAVVLGHIAKRRGFKSAAKRKATNISSDDKKMLTALEATRERLGRYRTVGEMFARDPDFASRRRNREGKYDRTTARDDLEHEVHALFAAQRRLGQGFASPELEEAFTASAFHQRPMQDSERLVGFCPFERTEKRAAKLTPSFERFRLLARLLNLRITTPDGERPLTVDEIALVTRDLGKTAKLSIKRVRTLIGLEDNQRFTTIRPEDEDRDIVARTGGAMTGTATLRKALGEALWTDMQERPEQLDAIVQVLSFFEANETITEKLREIGLTLAVLDVLLTALDAGVFAKFKGAAHISTKAARNLLPHLEQGRRYDEACTMAGYDHAASRLSHHGQIVAKTQFNALVTEIGESIANPIARKALIEGLKQIWAMRNHWGLPGSIHVELARDVGNSIEKRREIEKHIEKNTALRARERREVHDLLDLEDVNGDTLLRYRLWKEQGGKCLYTGKAIHIRQIAATDNSVQVDHILPWSRFGDDSFNNKTLCLASANQQKKRSTPYEWLSGQTGDAWNAFVQRIETNKELRGFKKRNYLLKNAKEAEEKFRSRNLNDTRYAARLFAEAVKLLYAFGERQEKGGNRRVFTRPGALTAALRQAWGVESLKKQDGKRINDDRHHALDALTVAAVDEAEIQRLTKSFHEWEQQGLGRPLRRVEPPWESFRADVEATYPEVFVARPERRRARGEGHAATIRQVKERECTPIVFERKAVSSLKEADLERIKDGERNEAIVEAIRSWIATGRPADAPPRSPRGDIITKIRLATTIKAAVPVRGGTAGRGEMVRADVFSKPNRRGKDEWYLVPVYPHQIMNRKAWPKPPMRSIVANKDEDEWTEVGPEHQFRFSLYPRSNIEIIRPSGEVIEGYFVGLHRNTGALIPTPVGPDSYVIA

SEQ ID NO: 74 - protein, 1368 aa, Streptococcus pyogenes
MDKKYSIGLDIGTNSVGWAVITDDYKVPSKKFKVLGNTDRHSIKKNLIGALLFDSGETAEATRLKRTARRRYTRRKNRICYLQEIFSNEIAKVDDSFFHRLEESFLVEEDKKHERHPIFGNIVDEVAYHEKYPTIYHLRKKLADSTDKADLRLIYLALAHMIKFRGHFLIEGDLNPDNSDVDKLFIQLVQTYNQLFEENPINASRVDAKAILSARLSKSRRLENLIAQLPGEKRNGLFGNLIALSLGLTPNFKSNFDLAEDAKLQLSKDTYDDDLDNLLAQIGDQYADLFLAAKNLSDAILLSDILRVNTEITKAPLSASMIKRYDEHHQDLTLLKALVRQQLPEKYKEIFFDQSKNGYAGYIDGGASQEEFYKFIKPILEKMDGTEELLAKLNREDLLRKQRTFDNGSIPHQIHLGELHAILRRQEDFYPFLKDNREKIEKILTFRIPYYVGPLARGNSRFAWMTRKSEETITPWNFEEVVDKGASAQSFIERMTNFDKNLPNEKVLPKHSLLYEYFTVYNELTKVKYVTEGMRKPAFLSGEQKKAIVDLLFKTNRKVTVKQLKEDYFKKIECFDSVEISGVEDRFNASLGTYHDLLKIIKDKDFLDNEENEDILEDIVLTLTLFEDREMIEERLKTYAHLFDDKVMKQLKRRRYTGWGRLSRKLINGIRDKQSGKTILDFLKSDGFANRNFMQLIHDDSLTFKEDLQKAQVSGQGDSLHEHIANLAGSPAIKKGILQTVKVVDELVKVMGRHKPENIVIEMARENQTTQKGQKNSRERMKRIEEGIKELGSDILKEYPVETTQLQNEKLYLYYLQNGRDMYVDQELDINRLSDYDVDHIVPQSFLKDDSIDNKVLTRSDKNRGKSDNVPSEEVVKKMKNYWKQLLNAKLITQRKFDNLTKAERGGLSELDKAGFIKRQLVETRQITKHVAQILDSRMNTKYDENDKLIREVRVITLKSKLVSDFRKDFQFYKVREINNYHHAHDAYLNAVVGTALIKKYPKLESEFVYGDYKVYDIRKMIAKSEQEIGKATAKYFFYSNIMNFFKTEITLANGEIRKRPLIETNGETGEIVWDKGRDFATVRKVLSMPQVNIVKKTEVQTGGFSKESILPKRNSDKLIARKKDWDPKKYGGFDSPTVAYSVLVVAKVEKGKSKKLKSVKELVGITIMERSSFEKDPVDFLEAKGYKEVRKDLIIKLPKYSLFELENGRKRMLASAGELQKGNELALPSKYVNFLYLASHYEKLKGSPEDNEQKQLFVEQHKHYLDEIIEQISEFSKRVILADANLDKVLSAYNKHRDKPIREQAENIIHLFTLTNLGAPAAFKCFDTTIGRNRYKSIKEVLDATLIHQSITGLYETRIDLSQLGGD

SEQ ID NO: 75 - protein, 1504 aa, Bacteroides dorei
MKNIVGLDLGTNSIGWAVVNGSVNDDGSEQLVKIQASGSRIIPMDAAMIGDFNKGNSISQTAERTRLRGVRRLSERYLLRRERLHRILDILGFLPFHFAQDLDRHGKIVKGKEPKLAWRKNEAGQFEFIFQDSFKEMLEDFKLNYPNLITDDKKVPYDWTIYYLRKKGLTSKISKEELAWILLNFNQKRGYYQLRGEEEEENKDKLVEFYALKVVAVEDSGEKKGKDIWYNVHLENGWVYRRTSNMSLDWVGKTKEFIVTTDLEKDGTPKKDKEGNVKRSFRAPKEDDWSLVKKKTEADIDQTHKTVGAYIYDTLLGNPSQKIRGRLVRTIERKYYKEELKLILEKQKEFHLELQDRALYAACIEELYPINEAHRNNVGNRDFTYLFLEDILFYQRPLKSKKSLIDNCPYEENQGLDKETGEIKSFPVKCIAKSHPLFQEFRLWQFIINLRIYRKDLAQDVDVTNELLKTEEDYVALFDWLNGKKEIDQKAFLKYPVFGLKKEIENYRWNYVQDKPYPCNETRSLMLARLEKCDISIEFLTKENEEALWHILYSVEDKNEIVKALQKFADKHDLNASFVDVFQKFPPFKKEYGSYSAKAIKKLLPLMRMGKYWSENSIDKGTRERIDKIITGEYDEKIENRVREKAIHLADVSDFKGLPLWLVCYIVYGRHSEAKEIIQWKSPADIDSYLRSFKQHSLRNPIVEQIIIETLRVVRDIWKQVGNIDEIHVELGREMKNPADKRKKMTQQMSENENTNLRIKYLLTEFLNPEYEVENVRPYSPSQQDILRIYEEGVLNSVSDLPEEISDILKKFTETDLKKRPSRSEVLRYKLWLEQKYRSPYTGEVIPLGKLFTPAYEIEHVIPQSYYFDDSFSNKVICEAEVNKLKSNLLGHEFIVKHHGEIVELPFGKKVRIFTVDEYEQFVKDNYSRTRSKMKKLLMDDIPEEFVTRQLNDSRYISKVVKSLLSNIVREKGEEEAISKNVIPCTGGVTDRLKKDWGINEVWNKIILPRFQRLNELTGTNKFTTKNVGIQEIPTMPLELQKGFNKKRIDHRHHAMDAIIIACANRNIINYLNNKSATAKAELSRYDLQKMLCDKAKTDNNGNYKWVIRKPWASFTQDTYLALENIIVSFKQNLRVINKATNRFLHYNEEGKKIFVKQGKGDNWAIRKSMHKDTVFGEVNLRRIKTVALNEAMKNPQSIVVKDFKRKLLELWNLGFDAKRIKKYFEDNRETWSDINLSKIEVYYFSKDTKDRFFATRKPLDTSFDRKKIENNITDTGIQKILLRHLELKDNNPDIAFSPDGIDEMNRNIIQLNNGKYHQPIIKIRWYEQADKFAVGQTGNKSSKFVEAAKGTNLFFAVYESNILDKKTNTIIKKRNYATIPLNVAIERQKQGLPVAPEDENGNDPIFVLSPNDLVYLPTDDELANGIIAQPLDRGRIYKMVSSSGEQCFFIKHIVANVLVDKFEFSPLNKMERALTGEMIKMICIPIKVDRLGNVLESSSSYKK

SEQ ID NO: 76 - protein, 1426 aa, Capnocytophaga sputigena
MKNILGLDLGITSISFAHIVEDENKEKSEIKELGVRIVSLTTDEQSDFEKGKSITTNANRTLKHGARLNLDRYQQRRKYLIDLLQKANLITSSSILAENGKNTTHSTWQLRAKAVTERIEKEEFARVLLAINKKRGYKSSRKAKTEDEGQAIDGMAIAKRLYDENLTPGQLSLQLLQQNKKLLPDFYRSDLQREFDLVWNFQKQFYPDILTDSFYKELQGKGKDATSKAFSKRYHFDTAENKGSKESVRLQAYQWRAEAISKQLSKEEVAYVLTEINNNLNNASGYLGAISDRSKELYFNRQTVGQYLYAQLQENRHNSLKNKVFYRQDYLDEFERIWETQASFHKELTDELKKQIRDVVIFYQRKLKSQKGLISFCEFESKEIEIEKDGKTITKTIGARVVPKSSPLFQEFKIWQILNNVTCKRKGIRKKKSSAKSTELDLFNEPSQTIFSLDMECKQLLFDELNLKGDLKSDKVLKLLGYSPQEWEINYNQLEGNRTQKALYEAYLKIVEMEAHDVKDILQIKSAKDDWSLDESPLSASEIKEKVKDIFQALGICTKILYFDPLLPVKEFEKQDSYQLWHLLYSYESDDSTSGNETLYRILEKKYAFKREHARILANVALQDDYGSLSTKAIRKIYPNIKENQYSKACELAGYKHSKLSLTTEELEARELKNIIPLLKKNALRNPVVEKILNQMINVVNALIEKNSERDAEGKITKYFHFDEIRIELARELKKNAQKRYEMTQNINKAKLEHQKISEILQKKFGIKNPTKSDIIRYRLYQELEHNGYKELYTNAPIARDMLFSKNIEIEHIVPKARVFDDSFSNKTLTFHRINSNKGEYTAFDYITSLNSEEELNQYLTRVENAYKTKSISLTKYKNLLKKASEIGDGFINRDLRDTQYIAKKAKEILFQVTKNVLSTSGSITDRLREDWGLVDVMKELNMPKYQSLGLTEVEERKEGNKVTVIKNWTKRNDHRHHAMDALTVAFTKPSYIQYLNHLNARKDENNKNYSVILAIEEKETIKVPTNNGKNKRVFIEPIPNFRQVAKKHLEEIFISHKAKNKVVTKNVNKPAGTDKQQITLTPRGQLHKETIYGKYQYYVNKEEKVGVKFDERTITKVSNPLYREALLKRLQANDNDPKKAFTGKNALSKNPIYLDETKTKTLPEKVNLTYLEEDFSIRKDISPDNFKDLKSIEKVIDQGVKRILIKRLQDYDNDPKKAFVDLEKNPIWLNKEKGIAIKRVTISGVSNAQPLHIGKDHLGKTTLNKEGNEIPVDYVSTGNNHHVAIYRDKEGNLQEQIVSFFEAVVRTQQGLPIIDKTYKQEEGWQFLFTMKQNEMFVFPNATTGFNPAEIDLLDPKNKKLISPNLFRVQKIATKDYFFRHHLETNVETDNVLKNTTWKREGLSGLKDIVKVRINHLGDIVSIGEY

SEQ ID NO: 77 - protein, 1443 aa, Parabacteroides johnsonii
MIKLLYLEKLKQYTMKKILGLDLGTSSIGWALVNEAENSDEVSSIIKLGVRVNPLTVDEMQNFEKGKSITTNADRTLKRSMRRNLQRYKLRRDALIELLKKVGFITDKTILSEQGNRTTFETYRLRAKAAEEEISLKELARVLLMINKKRGYKSSRKAKGEEEGALIDGMEIAKKLYDEDLTPGQLCLQLLESGKKFFPDFYRSDLQEEFNKIWDFQKQFNLFSFCDVAKEEVKGKNKSQTWAILAKYFVETKKVNVWNEHEAQTENREEVYKLVGLKRTVKGEELKKENYRWRVQALTEQLDLEKIAVVLQEINGQISASSGYLGAISDRSKVLYFNRQTVGQYQMAELNKNPNMSLRNMVFYRQDYLDEFNVIWEKQAEFHKELTPELKKEIRDIIIFYQRRLKSQKGLISFCEFENREVVVEKEGKKQTKIIGCKVIPRSHPLFQEFKIWQTLNNIEVFVGEKKGKRKKSNVSSDLFGDTEDALITEGRRFLYQEEKKILAKELSIKKGLTKAEILRLLFENPQELDINFKQIDGNQTGFALFSAYSNMIEKYGYEPLDFKKPAEDLISQLKTVFTDLGWNTDLLFIDLDKENKEWEKQPYFRLWHLLYSFEGDNTPTGNGKLIEKIMQLCGIEKEYAIELANVSLQDDYGSLSAKAIKKILLYLKEGNQYDMACEYAGYRHSKSSLTKEEIENKVLKDKLEILPKNSLRNPVVEKILNQMVNVINTVMEVYGRPDEIRVELARELKKSAKEREELTKAVAKNTREHEEIRKVLQSEFGMINVSRNDIIRYKLYEELKDNGYKTLYSNQYIPREKLFSKEIDIEHIIPQSRLFDDSLSNKTLEYKSINIEKGNKTAYDFVKEKYGEEGLQQYLNRCENLCKDKKAKLRKLKMELNEIPDGFIDRDLRNTQYIAKKALSMLTEICRRVVATTGSITDKLREDWQLVDVMKELNLPKYEALGLVEVYEDKDGRKIKRIKDWTKRNDHRHHAMDALTVAFTKDVFIQYFNNKNAAWESDSKEHTNIVGIKTRYFESGKAVPPIPLGQFRVEAKCHLENLLVSIKAKNKVVTTNVNCIKKKGGTYKNTQQTPRGQLHLETIYGSHNQYVTKIEKVNASFDAVKIATVSKQDYRNALLKRLEVFGNDPKKAFTGKNSLEKNPIYLDRAQTIQVPDKVQTVELETAYTIRKPVDPTLNVDKVVDKKIRLILEQRLKEYGGDAKKAFVNLDENPIWLNEEKGISIKRVTIRGISKAQALHDKKDKDGNFILDETGKRIPVDFVNTGNNHHVAIYRKPVLDKKGQVIFDDEGNPMYELDEDVVPFFEAVTRANLGIPIIDKDYKKSEGWQFLFSMKQNEYFVFPNEKTGFNPKEVDLLDPDNYAMISPNLFRVQKIGLNDYTFRHHLETTIQNDLKFITWIRCGKSGIKDIVKVRINHIGQIVSVGEY

SEQ ID NO: 78 - protein, 984 aa, Campylobacter jejuni
MARILAFDIGISSIGWAFSENDELKDCGVRIFTKVENPKTGESLALPRRLARSARKRLARRKARLNHLKHLIANEFKLNYEDYQSFDESLAKAYKGSLISPYELRFRALNELLSKQDFARVILHIAKRRGYDDIKNSDDKEKGAILKAIKQNEEKLANYQSVGEYLYKEYFQKFKENSKEFTNVRNKKESYERCIAQSFLKDELKLIFKKQREFGFSFSKKFEEEVLSVAFYKRALKDFSHLVGNCSFFTDEKRAPKNSPLAFMFVALTRIINLLNNLKNTEGILYTKDDLNALLNEVLKNGTLTYKQTKKLLGLSDDYEFKGEKGTYFIEFKKYKEFIKALGEHNLSQDDLNEIAKDITLIKDEIKLKKALAKYDLNQNQIDSLSKLEFKDHLNISFKALKLVTPLMLEGKKYDEACNELNLKVAINEDKKDFLPAFNETYYKDEVTNPVVLRAIKEYRKVLNALLKKYGKVHKINIELAREVGKNHSQRAKIEKEQNENYKAKKDAELECEKLGLKINSKNILKLRLFKEQKEFCAYSGEKIKISDLQDEKMLEIDHIYPYSRSFDDSYMNKVLVFTKQNQEKLNQTPFEAFGNDSAKWQKIEVLAKNLPTKKQKRILDKNYKDKEQKNFKDRNLNDTRYIARLVLNYTKDYLDFLPLSDDENTKLNDTQKGSKVHVEAKSGMLTSALRHTWGFSAKDRNNHLHHAIDAVIIAYANNSIVKAFSDFKKEQESNSAELYAKKISELDYKNKRKFFEPFSGFRQKVLDKIDEIFVSKPERKKPSGALHEETFRKEEEFYQSYGGKEGVLKALELGKIRKVNGKIVKNGDMFRVDIFKHKKTNKFYAVPIYTMDFALKVLPNKAVARSKKGEIKDWILMDENYEFCFSLYKDSLILIQTKDMQEPEFVYYNAFTSSTVSLIVSKHDNKFETLSKNQKILFKNANEKEVIAKSIGIQNLKVFEKYIVSALGEVTKAEFRQREDFKK

SEQ ID NO: 79 - protein, 1082 aa, Neisseria meningitidis
MAAFKPNPINYILGLDIGIASVGWAMVEIDEDENPICLIDLGVRVFERAEVPKTGDSLAMARRLARSVRRLTRRRAHRLLRARRLLKREGVLQAADFDENGLIKSLPNTPWQLRAAALDRKLTPLEWSAVLLHLIKHRGYLSQRKNEGETADKELGALLKGVADNAHALQTGDFRTPAELALNKFEKESGHIRNQRGDYSHTFSRKDLQAELILLFEKQKEFGNPHVSGGLKEGIETLLMTQRPALSGDAVQKMLGHCTFEPAEPKAAKNTYTAERFIWLTKLNNLRILEQGSERPLTDTERATLMDEPYRKSKLTYAQARKLLGLEDTAFFKGLRYGKDNAEASTLMEMKAYHAISRALEKEGLKDKKSPLNLSPELQDEIGTAFSLFKTDEDITGRLKDRIQPEILEALLKHISFDKFVQISLKALRRIVPLMEQGKRYDEACAEIYGDHYGKKNTEEKIYLPPIPADEIRNPVVLRALSQARKVINGVVRRYGSPARIHIETAREVGKSFKDRKEIEKRQEENRKDREKAAAKFREYFPNFVGEPKSKDILKLRLYEQQHGKCLYSGKEINLGRLNEKGYVEIDHALPFSRTWDDSFNNKVLVLGSENQNKGNQTPYEYFNGKDNSREWQEFKARVETSRFPRSKKQRILLQKFDEDGFKERNLNDTRYVNRFLCQFVADRMRLTGKGKKRVFASNGQITNLLRGFWGLRKVRAENDRHHALDAVVVACSTVAMQQKITRFVRYKEMNAFDGKTIDKETGEVLHQKTHFPQPWEFFAQEVMIRVFGKPDGKPEFEEADTPEKLRTLLAEKLSSRPEAVHEYVTPLFVSRAPNRKMSGQGHMETVKSAKRLDEGVSVLRVPLTQLKLKDLEKMVNREREPKLYEALKARLEAHKDDPAKAFAEPFYKYDKAGNRTQQVKAVRVEQVQKTGVWVRNHNGIADNATMVRVDVFEKGDKYYLVPIYSWQVAKGILPDRAVVQGKDEEDWQLIDDSFNFKFSLHPNDLVEVITKKARMFGYFASCHRGTGNINIRIHDLDHKIGKNGILEGIGVKTALSFQKYQIDELGKEIRPCRLKKRPPVR

SEQ ID NO: 80 - protein, 1021 aa, Clostridium cellulolyticum
MKYTLGLDVGIASVGWAVIDKDNNKIIDLGVRCFDKAEESKTGESLATARRIARGMRRRISRRSQRLRLVKKLFVQYEIIKDSSEFNRIFDTSRDGWKDPWELRYNALSRILKPYELVQVLTHITKRRGFKSNRKEDLSTTKEGVVITSIKNNSEMLRTKNYRTIGEMIFMETPENSNKRNKVDEYIHTIAREDLLNEIKYIFSIQRKLGSPFVTEKLEHDFLNIWEFQRPFASGDSILSKVGKCTLLKEELRAPTSCYTSEYFGLLQSINNLVLVEDNNTLTLNNDQRAKIIEYAHFKNEIKYSEIRKLLDIEPEILFKAHNLTHKNPSGNNESKKFYEMKSYHKLKSTLPTDIWGKLHSNKESLDNLFYCLTVYKNDNEIKDYLQANNLDYLIEYIAKLPTFNKFKHLSLVAMKRIIPFMEKGYKYSDACNMAELDFTGSSKLEKCNKLTVEPIIENVTNPVVIRALTQARKVINAIIQKYGLPYMVNIELAREAGMTRQDRDNLKKEHENNRKAREKISDLIRQNGRVASGLDILKWRLWEDQGGRCAYSGKPIPVCDLLNDSLTQIDHIYPYSRSMDDSYMNKVLVLTDENQNKRSYTPYEVWGSTEKWEDFEARIYSMHLPQSKEKRLLNRNFITKDLDSFISRNLNDTRYISRFLKNYIESYLQFSNDSPKSCVVCVNGQCTAQLRSRWGLNKNREESDLHHALDAAVIACADRKIIKEITNYYNERENHNYKVKYPLPWHSFRQDLMETLAGVFISRAPRRKITGPAHDETIRSPKHFNKGLTSVKIPLTTVTLEKLETMVKNTKGGISDKAVYNVLKNRLIEHNNKPLKAFAEKIYKPLKNGTNGAIIRSIRVETPSYTGVFRNEGKGISDNSLMVRVDVFKKKDKYYLVPIYVAHMIKKELPSKAIVPLKPESQWELIDSTHEFLFSLYQNDYLVIKTKKGITEGYYRSCHRGTGSLSLMPHFANNKNVKIDIGVRTAISIEKYNVDILGNKSIVKGEPRRGMEKYNSFKSN

SEQ ID NO: 81 - protein, 1131 aa, Acidovorax ebreus
MAQHVFGLDIGIASVGWAILGEQRIIDLGVRCFDKAETAKEGDPLNLTRRQARLLRRRLYRRAWRLTQLSRLLKRKGLIADAKLFAKAPSYGDSAWELRRQGLDRLLTPLEWARVIYHQCKHRGFHWTSKAEEAKADSDAEGGRVKQGLAHTKALMQAKNYRSAAEMVLAEFPDAQRNKRGQYDKALSRVLLGEELALLFATQRRLGNPHASDFFEKLILGDGDRKSGLFWQQKPALSGADLLKMLGKCTFEKGEYRAPKASFSVERHVWLTRLNNLRIVVDGRSRPLNEAERQAALLLPYQTETSKYKTLKNAFIKAGLWGDGVRFGGLAYPSQAQIDAEKTKDPEDQFLVKLPAWHELRKAFKAAGHEALWQQISTPALDGDPTLLDQIATVLSVYKDGAEVVQQLRQLALPEPAASIAVLEKISFDKFSSLSLKALRRIVPLMQSGLRYDEAVAQIPEYGHHSQRIEPGAAKHLYLPPFYEAQRKYAGKGDHIGSMQFRDDADIPRNPVVLRALNQARKVVNALIREYGSPIAVNIEMARDLSRPLDERNKVKRAQEEFRDRNDRARSEFERDFGYKPKAAAFEKWMLYREQLGQCAYSQQPLDIQRVLDDHNYAQVDHALPYSRSYDDSKNNKVLVLTHENQNKGNRTAFEYLTSFPDGEDGERWRTFVAWVQGNKAYRMAKRNRLLRKNYGVDESKGFIDRNLNDTRYICKFFKNYVEEHLQLAARADGDTARRCVVVNGQLTAFLRARWGLTKVRGDSDRHHALDAAVVAACTHGMVKALADYSRRKEISFLQEGFPDPETGEILNPAAFDRARQHFPEPWTHFAHELKARLFTDDLAALREDMQRLGSYTTEDLGRLRTLFVSRAPQRRSGGAVHKETIYAQPESLKQQGGVIEKILLTSLKLQDFDKLLNPESNDHFVEPHRNERLYAAIRQRLEQFGGRADKAFGPDNLFHKPDKNNQPTGPVVRSIKLVRGKQTGIPIRGGLAKNDSMLRVDIFTKAGKFHLVPVYVHHRVTGLPNRAIVAFKDEDEWTLIDESFAFLFSVYPNDYVKVTLKKEQQSGYYSGADRSTGAMNLWAHDRAASVGKDGLIRGIGVKTALSVEKFNVDVLGRIYLAPPETRSGLA

SEQ ID NO: 82 - protein, 1122 aa, Streptococcus suis
MSNGKILGLDIGIASVGVGVIDAQTGEIIHASSRIFPSANAANNAERRTFRGSRRLIRRKKHRIKRLDDLFNDFHINLDGEMSTDNPYVLRVKGLSQKLTVEELYISIKNIMKRRGISYLDDAESDNEAGRSDYAKAIERNRQLLTSKTPGEIQLERLEKYGQLRGNFTIIDEEGQSQQIINVFSTSDYVKEVEKILDCQKMYHKFISDEFCDKLIELLREKRKYYVGPGNEKSRTDYGIYRTDGTTLENLFGILIGKCTFYPDQYRSSRASYTAQEFNFLNDLNNLTVPTETKKLSQEQKEFLVNYAKETSVLGAGKILQQIAKLADCKVEDIRGYRLDNKDKPELHTFETYRAMKGLVPLVDIGVLSREQLDILADILTLNTDFEGIREALKKQLPNVFDEKQVKGLASFRKSKSQLFAKGWHNLSQKIMLEVIPELYATSDEQMTILTRLGKFEKSSVAEYPSSINVDEITDEIYNPVVAKSIRQTIKIINASIKKWGEFDQIVIEMPRDRNEDEEKKRIADGQKANAKEKADSILRAAELYCAGKVLPDYVYNGHNQLATKIRLWYQQGERCIYTGQPISIHDLIHNQNQYEIDHILPLSLTFDDSLSNKVLVLATANQEKAQRTPYNYLKSATSAWSYREFKDYVTKRKGIGKKKCEYLTFEEDINGFEVRSKFIQRNLVDTRYASKVILNALQDYFKISGIQTKVSVVRGQFTSQLRHKWGIEKTRETYHHHAVDALIIAASSQLRLWKKQESPLVVDYQEGRQVDLETGEILELTDEQYKELVYQPPYQGFVNTISSSAFDNEILFSYQVDSKVNRKISDATIYATRNAQLGKDKTEGIYVLGKIKDIYTQAGYEAFLKRYTKDKTSFLMYHKDLDTWEKVIEIILRDYREYDEKGKEIGNPFERYRRENGYVKKYSRKGNGTAIKSLKYYDNKLGNHIDITPENSRNAVVLQSLKPWRTDVYFNKETGKYEFLGIKYSDLSFEKGTGEYGISQEKYDSIKIAEGVAKKSIFKFTLYKQDLLFIKDIENNFGKLLRFTSKNDTSKHYVELKPYDKNKFGTEEPLLPVLGNVAKSGQCIKGLNKSNISIYKVRTDILGYRHFIKQEGEHPQLKFKK

SEQ ID NO: 83 - protein, 1509 aa, Bacteroides coprophilus
MKKTLGLDLGTNSIGWAVINSNIDSEGKEKLVGISSCGSRIIPMDATTLGDFGKGNTKSPVAERTRLRGIRRLLERSLLRRERLHRVLSVMGFLPEHYASQLDRYGKFLPETEPKLAWYKDDSGRYQFLFQKSFHEMLEDFRQHQPELVAGEKKIPYDWTIYYLRKKALSQEITKEELAWILLNFNQKRGYYQLRGEEEQEENNKSVEYHALKVVSVEDSGERKGKDIWYNVTLENGWVYRRASNIPLDWTGKVKEFVVTTELDDAGNPKKDKEGNVKRSFRAPKEDDWGLLKTRTQAQIDESGKTVGTYIYESLLCMPNQKIRGKLVRTIERKYYKDELRQILVKQSEFHAALQDHNLLLSCIEELYPNNEAHRRLLSASSFIYFLIEDILFYQRPLKSQKGLIDNCPYESHIYKDKKDGSLHHVPLKCVSKSHPLFQEFRLWQFLSNLRIYQRERMMDGSLKLDVDVTREFLPSEEDYVKLFDWLNERKEISQKFLLAYKPFGLKKNEQANYRWNYVEDKSYPCNETRAEIKSRLSKAGVPEEFLTEEKEEALWHILYSISDKKELTKALGTFAAKNCLNESFVEVFAKIPPFESNYAAYSLKAIRKLLALMRMGKYWNEQAIDRQTRDRIEKILTGEYDETIRSRVREKAMLLTDISSFRGLPLWLACYIVYDRHSESKELVKWETPADIDHFLSKFKQNSLRNPIVEQVITESLRTVRDIWKQEGKIDEIHVELGREMKNPAKERARITAQVQENENTNLRIKALLAEFMNPEFEIENVHPYSPGQQEILRIYEDGVLSGIAEKDLPDDITAILKKFRENDVKKRPTTSEVLRYKLWLEQRYRSPYTGRVIPLGKLFTPAYEIEHVIPQSRYFDDSISNKVICESAVNKLKDNCLGYEFIKKHSGEMVELGNGETVPVFSVEEYERFVKESYFGNSKKMKKLLLEDIPDSFIERQLNDSRYISRVVTSLLSNLVCEEGEQDGLSKNVIVCTGGITDRLKKDWGVQEVWNRIILPRFLRLNEITGRTDFTSTSVNGHLLPALPLYLQKGFNKKRIDHRHHAMDAIVIACANRNIVNYLNNSSARKNSEISRYDLQRLLCEKVKTDANGNYKWILRKPWETFTQDVYAALTNIVVSFKQNLRVINRTTNYYQHYNEAGEKRMIPQTKGDRWAIRKPMHKDTVYGEVNLRKEKTLPLRDVVKNPSIVVDKSLKNKLYELLKSQYDLKAIAKYFETHQDVWADVNLKKIKVYYFTKETNERFFATRKSLDPSFDQKKIEEEVTDTGVQKILLHHLQQNNNDPDMAFSPDGIDRMNQNMTILNDGKWHQPIYKVRTYEKADKFAVGESGNKAKKFVEAAKGTNLFFAVYESVQEDEAIGKQVCKRTFATIPLNEVIKRKKQGLPAAPEDLNGNLPKFVLSPNDLVYLPTEEERNSSRIIQPLDRERIYKMVSSSGSQCFFIKVFVANSIWDKNEYSSLNKMERAITNEMIKEICVPIKIDRLGNVSLIQI

SEQ ID NO: 84 - protein, 1219 aa, Bacteroides cellulosilyticus
MKEEVRGKNRSQTWAILAKFFVWSEKESVWNEKEARTEERVKEYKLVGLKRDTKGNELKLENYRWRVQALSEQLNPEIVAIVLQEINGQISASSGYLGAISDRSKQLYFNRQTVGQYLMSELEKDPNVSLRNRVFYRQDYLDEFDRIWEKQAEFHEELTVELKKEIRDIIIFYQRRLKSQKGLISFCEFEKREVVVEEDGRKKNKTVGCRVIPRSHPLFQEFKIWQTLNDIEVFAWDKQSKRKKADKSSILFDNSEDALLVEGKRFLYQEEKELLAKELFVKESMKKAEVLKLLFENYQELDLNFKQIDGNHTGFALFSAYSKMIEKYGYEPVDFKRSADEIIEKLETIFTNLGWNTELLSIDLSKEDKELERQSYFRLWHLLYSFEGDNTPTGNGKLLEKIMQLCDVEKEYAVELANVSFQEDYGSLSAKAIKKILPYLKEGNQYDVACDYAGYRHSRSSLTKDEIENKILKDKLEILPKNSLRNPVVEKILNQMVNLINTLIDTYGKPDEIRVELARELKKNAKEREELTKSIARNTREHDEIRQLLRTEFGMMNVSRNDIIRYKLYEELKDNGYKTLYSNEYIPREKIFSKEIDIEHVIPQARLFDDSLSNKTLEYRAINIEKGNKTAYDFVKEKYGNDGLEKFLNRCETLFKDKRTKLRKLKMEEKDIPEGFIDRDLRNTQYISKKAFAMLNEISRRVVATTGSITDKLREDWQLVDLMKELNLPKYEKLGMVEMFEDKDGRKIKKITDWTKRNDHRHHAVDALTVAFTKDVFIQFYNNKNAAWMPASKEHANITGIKARYFENGKALAPMPLAQFRAEAKRHLENLLVSIKAKNKVITSNVNRTKNKNGENRKLQQTPRGQLHLETVYGSHRQYATKIEKVNAAFDVTKIATVSKLAYRNALLKRLEAFGNDPKKAFTGKNTLEKNPLYLDENQTEMVPEKVQTVEFETVYTIRKPIDPNLSIDKVVDVKIRSVLEKRLKEYGGDAKKAFVNLDENPIWLNEAKGISIKRVSIRGISNAQSLHEKKDKDGNLILGKEGRKIPVDFVNTGNNHHVAIYKKPVLDKVGQVVLDEEGNPKYELDEVVVSFFDAVTRANLGQPIIDKDYRRSEGWQFLFSMKQNEYFVFPNDKTGFNPKEVDLLNPENYALISPNLFRVQKFAYKNYVFRHHLETTIKDTSSTLKGITWTDFRSSKGLDKIVKVRVDHIGQIVSIGEY

SEQ ID NO: 85 - protein, 1329 aa, Catenibacterium mitsuokai
IVDYCIGLDLGTGSVGWAVVDMNHRLMKRNGKHLWGSRLFSNAETAANRRASRSIRRRYNKRRERIRLLRAILQDMVLEKDPTFFIRLEHTSFLDEEDKAKYLGTDYKDNYNLFIDEDFNDYTYYHKYPTIYHLRKALCESTEKADPRLIYLALHHIVKYRGNFLYEGQKFNMDASNIEDKLSDIFTQFTSFNNIPYEDDEKKNLEILEILKKPLSKKAKVDEVMTLIAPEKDYKSAFKELVTGIAGNKMNVTKMILCEPIKQGDSEIKLKFSDSNYDDQFSEVEKDLGEYVEFVDALHNVYSWVELQTIMGATHTDNASISEAMVSRYNKHHDDLKLLKDCIKNNVPNKYFDMFRNDSEKSKGYYNYINRPSKAPVDEFYKYVKKCIEKVDTPEAKQILNDIELENFLLKQNSRTNGSVPYQMQLDEMIKIIDNQAEYYPILKEKREQLLSILTFRIPYYFGPLNETSEHAWIKRLEGKENQRILPWNYQDIVDVDATAEGFIKRMRSYCTYFPDEEVLPKNSLIVSKYEVYNELNKIRVDDKLLEVDVKNDIYNELFMKNKTVTEKKLKNWLVNNQCCSKDAEIKGFQKENQFSTSLTPWIDFTNIFGKIDQSNFDLIENIIYDLTVFEDKKIMKRRLKKKYALPDDKVKQILKLKYKDWSRLSKKLLDGIVADNRFGSSVTVLDVLEMSRLNLMEIINDKDLGYAQMIEEATSCPEDGKFTYEEVERLAGSPALKRGIWQSLQIVEEITKVMKCRPKYIYIEFERSEEAKERTESKIKKLENVYKDLDEQTKKEYKSVLEELKGFDNTKKISSDSLFLYFTQLGKCMYSGKKLDIDSLDKYQIDHIVPQSLVKDDSFDNRVLVVPSENQRKLDDLVVPFDIRDKMYRFWKLLFDHELISPKKFYSLIKTEYTERDEERFINRQLVETRQITKNVTQIIEDHYSTTKVAAIRANLSHEFRVKNHIYKNRDINDYHHAHDAYIVALIGGFMRDRYPNMHDSKAVYSEYMKMFRKNKNDQKRWKDGFVINSMNYPYEVDGKLIWNPDLINEIKKCFYYKDCYCTTKLDQKSGQLFNLTVLSNDAHADKGVTKAVVPVNKNRSDVHKYGGFSGLQYTIVAIEGQKKKGKKTELVKKISGVPLHLKAASINEKINYIEEKEGLSDVRIIKDNIPVNQMIEMDGGEYLLTSPTEYVNARQLVLNEKQCALIADIYNAIYKQDYDNLDDILMIQLYIELTNKMKVLYPAYRGIAEKFESMNENYVVISKEEKANIIKQMLIVMHRGPQNGNIVYDDFKISDRIGRLKTKNHNLNNIVFISQSPTGIYTKKYKL

SEQ ID NO: 86 - protein, 1152 aa, Roseburia inulinivorans
MNAEHGKEGLLIMEENFQYRIGLDIGITSVGWAVLQNNSQDEPVRITDLGVRIFDVAENPKNGDALAAPRRDARTTRRRLRRRRHRLERIKFLLQENGLIEMDSFMERYYKGNLPDVYQLRYEGLDRKLKDEELAQVLIHIAKHRGFRSTRKAETKEKEGGAVLKATTENQKIMQEKGYRTVGEMLYLDEAFHTECLWNEKGYVLTPRNRPDDYKHTILRSMLVEEVHAIFAAQRAHGNQKATEGLEEAYVEIMTSQRSFDMGPGLQPDGKPSPYAMEGFGDRVGKCTFEKDEYRAPKATYTAELFVALQKINHTKLIDEFGTGRFFSEEERKTIIGLLLSSKELKYGTIRKKLNIDPSLKFNSLNYSAKKEGETEEERVLDTEKAKFASMFWTYEYSKCLKDRTEEMPVGEKADLFDRIGEILTAYKNDDSRSSRLKELGLSGEEIDGLLDLSPAKYQRVSLKAMRKMQPYLEDGLIYDKACEAAGYDFRALNDGNKKHLLKGEEINAIVNDITNPVVKRSVSQTIKVINAIIQKYGSPQAVNIELAREMSKNFQDRTNLEKEMKKRQQENERAKQQIIELGKQNPTGQDILKYRLWNDQGGYCLYSGKKIPLEELFDGGYDIDHILPYSITFDDSYRNKVLVTAQENRQKGNRTPYEYFGADEKRWEDYEASVRLLVRDYKKQQKLLKKNFTEEERKEFKERNLNDTKYITRVVYNMIRQNLELEPFNHPEKKKQVWAVNGAVTSYLRKRWGLMQKDRSTDRHHAMDAVVIACCTDGMIHKISRYMQGRELAYSRNFKFPDEETGEILNRDNFTREQWDEKFGVKVPLPWNSFRDELDIRLLNEDPKNFLLTHADVQRELDYPGWMYGEEESPIEEGRYINYIRPLFVSRMPNHKVTGSAHDATIRSARDYETRGVVITKVPLTDLKLNKDNEIEGYYDKDSDRLLYQALVRQLLLHGNDGKKAFAEDFHKPKADGTEGPVVRKVKIEKKQTSGVMVRGGTGIAANGEMVRIDVFRENGKYYFVPVYTADVVRKVLPNRAATHTKPYSEWRVMDDANFVFSLYSRDLIHVKSKKDIKTNLVNGGLLLQKEIFAYYTGADIATASIAGFANDSNFKFRGLGIQSLEIFEKCQVDILGNISVVRHENRQEFH

SEQ ID NO: 87 - protein, 686 aa, Coprococcus comes
MKKQDSPKNNMGYTAYNLNVLGYEEFAKRVELLFKDTDAVKRLNDSHMQMAEGFDLNALPGSPALRRGVSQAIKVLDDIVSVAGKAPDRIYLKVTRTASNSRKGKRTAKRSDKIKQALKALDADAAADLGAAKLLRELGMFDEKEINERIYLYFHQAGKCLYTGKPIDITRIASNDYYVDHVVPLAYRKDESLDNKVLVYAEASRYKSETLLVSPAVQRKMLPFWRMLRNAGLMSERKLNALIRTEISEGMLKSIIGRQFTENSWEAKLFTAAIAAKYPGTVVIPVKAGVIGAVRSRIGIPKSLKANQFYHAHDALLAAEVGRYMELAKPAFVHNRVKYEQYMRKIKLVNEENKKAPKSQLDFFAGGFFFDRVDKDTGEVYWNKDEEVERIYRACGWKNLRVTYAAFEDGGAFWKQTIYSPREKSKLIATKSDRPAEIYGGYSSQTFANFFVYEVMKKKVKQLRFGAVPAAIASKSDPDTYNAMLEMYARGLAKTAKEKFVRIVRARVLKNTMIELYGERFRIAGEKQVYPVRQMPLAIDEVYLLKGVETIAAAGNAGASAKIDFEKAAESLVGFWDLLLEKLPVNYPKLTVQLKLGLLKHPKDILAATSESEFPAIVYKIAEAEIQVMEQASGLRNMSDTKILGGNTFGGSLVFTFNKVLNDPKSKACFIDTTPAGLYEVKTKIW

SEQ ID NO: 88 - protein, 1105 aa, Actinomyces coleocanis
MDNKNYRIGIDVGLNSIGFCAVEVDQHDTPLGFLNLSVYRHDAGIDPNGKKTNTTRLAMSGVARRTRRLFRKRKRRLAALDRFIEAQGWTLPDHADYKDPYTPWLVRAELAQTPIRDENDLHEKLAIAVRHIARHRGWRSPWVPVRSLHVEQPPSDQYLALKERVEAKTLLQMPEGATPAEMVVALDLSVDVNLRPKNREKTDTRPENKKPGFLGGKLMQSDNANELRKIAKIQGLDDALLRELIELVFAADSPKGASGELVGYDVLPGQHGKRRAEKAHPAFQRYRIASIVSNLRIRHLGSGADERLDVETQKRVFEYLLNAKPTADITWSDVAEEIGVERNLLMGTATQTADGERASAKPPVDVTNVAFATCKIKPLKEWWLNADYEARCVMVSALSHAEKLTEGTAAEVEVAEFLQNLSDEDNEKLDSFSLPIGRAAYSVDSLERLTKRMIENGEDLFEARVNEFGVSEDWRPPAEPIGARVGNPAVDRVLKAVNRYLMAAEAEWGAPLSVNIEHVREGFISKRQAVEIDRENQKRYQRNQAVRSQIADHINATSGVRGSDVTRYLAIQRQNGECLYCGTAITFVNSEMDHIVPRAGLGSTNTRDNLVATCERCNKSKSNKPFAVWAAECGIPGVSVAEALKRVDFWIADGFASSKEHRELQKGVKDRLKRKVSDPEIDNRSMESVAWMARELAHRVQYYFDEKHTGTKVRVFRGSLTSAARKASGFESRVNFIGGNGKTRLDRRHHAMDAATVAMLRNSVAKTLVLRGNIRASERAIGAAETWKSFRGENVADRQIFESWSENMRVLVEKFNLALYNDEVSIFSSLRLQLGNGKAHDDTITKLQMHKVGDAWSLTEIDRASTPALWCALTRQPDFTWKDGLPANEDRTIIVNGTHYGPLDKVGIFGKAAASLLVRGGSVDIGSAIHHARIYRIAGKKPTYGMVRVFAPDLLRYRNEDLFNVELPPQSVSMRYAEPKVREAIREGKAEYLGWLVVGDELLLDLSSETSGQIAELQQDFPGTTHWTVAGFFSPSRLRLRPVYLAQEGLGEDVSEGSKSIIAGQGWRPAVNKVFGSAMPEVIRRDGLGRKRRFSYSGLPVSWQG

SEQ ID NO: 89 - protein, 1361 aa, Anaerococcus tetradius
MGNYYLGLDIGTNSVGWAVTDENYNIERFKKKNMWGIRLFDEAKTAESRRIHRQARRMRQRKIQRLNLLMELFDVEISKVDESFFIRKKESDLHYEDKSQDSRYALFNDKEFNDKDYHNKYPTIFHLIMDLIENDEKKDIRLLYLACHYLIKNRGHFIFEGQKFDVNSSLNNNINKLKSHLDQFYNICLDFDNDKLIEILVNQNLNISEKSKKIKELLRKTNLEVGIANLIAGGSIKLSNMFDDDELKNLDYNSLSFKNSNFDEGRELFEEVLEDRFELVEILKDIHDASVLETMLSSASISPDGGKYISSSMINSYNKHKRDLKLLKKIIKKYKKSEYDNIFRDENIKNNYLSYTRTGINKNKKVQAEDNTDSDGFYKYIVKILKDIKENDSDEDIKYILSEIDKKNFVPKQRTKENSVIPYQLREIELRKIIDNQSKYHKFLNEVDEKGISVKEKIISLLTFRIPYYIGPLNPSYNEEKNFTTSWVKRLAKGKVTPWNFEDMVDIDASREAFIENKLNKCSFLLDETVLPKDSLLYQEYMVLNELNNLKINGQSINTDLKKSIYEELFKKYKKVTRKRLISYIKEKENMSGDIVITGIDGDFKQGLKSYIAFKDIIGEKIDDDIYRKEVEKIIRDISLYGDDKSFIQKKIKNENKLDLSDDQISKIAKLKFKDWGRFSKKLLVGIKASDKNTGEIDNIIGFMRNYNYNIMQLMANVFTFKDEIEKLNSKYYTDEKINIDYLDDLYLSSPAKRMLWQSFQIVDEIKNIKNSDPKKIFIEMARSKEDKPTRKMSRKSRLEKLYTDSKKQFIKLFGPDEYDKLNNEIKNKSESDFRWDNLYLYYTQFGRCMYSLDPIDLEELSNKNLYDQDHIYPKSKIYDDSIENRVLVKKQLNLDKSNEYPIPDRVLNKDKNKLLAFWKMLNEKELIGDKKYARLIRKSPFTDEELGDFIARQLVETRQATKETANMLKRLCPDSKIVYVKAKNVSDFRRKFDILKCRSINDLHHAHDAYLNIVVGNVFDTKFTSNPLNFIKNNSKNRSYNLEKIYDYDVIRNEKIAWLAERKEENQDGSIATVLKNLSKNDIRVTRRTYIKCEDLFDENIVRKGNGKFPIKENNNKSDTNKYGGYSGIKNAYFVLLEDEKHNRILEAIPSFIYKKEKNGEKGSVINYLQNILGIKSAKILRDKIKIGSLLKIDKFPYNLAGKSGNGILISGGVQLILDKNTSKYIKKIENYKYKLDENKDYQINIFDKLSKEENIKLFDLFVDKFENSIYKNRVNIKLKEIKLARPKFEHLSIEEQIKTLTQMLILFGRENNAVNLEYIGLPKNTGKTKINKKINNKDIKIINQSITGLYETEEDLANI

SEQ ID NO: 90 - protein, 1377 aa, Lactobacillus brevis
MESNHDGEQVKYTLGLDIGTSSIGYAAIDKHQKPIRAKGKHVIGVRLFQEGQTAADRRAFRTTRRRLKRRKWRLNLLNRLFDPYLSEVDPNFLPRLRQSNLSPKDDNKHFNGSTLFPDKTDAAFYRQYPTMYHLRYALMTEKRKFDIREVYLAIHHIVKYRGNFLNSATVDSFKTSNIDFTSQFDRLNELYRQVILDEPFQINMDQVDEMTNKLLDNDALKLDTQKQVAKLLPVIYNDKPIDKQYTRIATEFSKAILGYKTKLDVILNLDTQNAKDWVIRLDDEDIDDKLPALVENLDESRQEIVTIIRDLYAQITLNAIVPKGKSLSESMVDKYNDHKDHLDLLMGLIHELGDDSAKGIKLREAYTQYVGKSDDKTLNQDDFYAAIKKNLDEDSKRSPKIQRLIEQASFMPKQRTSANGVIPHQLHQLELDRIIENQGRYYPFLKKPNPNTHKPNGGKYKLDELVAFRIPYYVGPLITKRDQEKTSGADFAWMIRKPGQEGEITPWNFDQKVDRMASANRFIRRMTTKDSYLVAEDVLPDASLIYEKFKALNELNMLKVNDSRLSPSQKQDLFNNLFKKQKTIRTKKLQTYIRTNWELPSVMISGLADPDKFNSSLSTYIDFRDIFGEKVDDPNRQADYEEIIEWSTVFEDRKIYQAKLNQLDWLTEPQRKALLTKRYTGWGRLSKKLLTGLKDQNGDSILDQLWKTNDNFMQIQSRDEFAKQIHDENAKQFHEANNVDDILDDAFTSPQNKKAIRQVDKVVQDVVKAVGYAPDKIAIEFTRSLENNPQRTVSRQRQLQAAYKNIPREIMKSGLMAELGSVADSKKVLSDKLYLYFTQMGKDMYEDKTINIDNLPNYDIDHILPQAFIKDDSIDNRVLISKEENARKSNRVPLKFFGAKRMGFWKDLLNNGLISNRKFQNLTTDPEKISKYSAKGFIHRQLVETSQVIRLVANILGNEYSQAGTTIIEVSAKMNRQLREDFHLIKNRNVNDYHHAMDAYLTAYVGDYLYLRYPKLRPYFVYGDFKKAEDQDLNIRNFNFLHDLKDNESLDKIVDSETGEIVWEKHGSVKQLKKVYHYKFMLVSQEVYTRQDALFNQTIYPASDADKRKLIPIKNSKPVDVYGGYSGNIDAYMAIVRVHGKKEDNYKVVGIPMRAVTKLKKAEKEGHDSYLNAVHEVLKPQFTKKKKNRKTGEITETVDEFDVLLGKVYYRQLIVDGNKKFMLGSSSYQYNAKQLVLSDKAMQVLSKNGKVKSQDENQNLIDVYDEILEKVDQYFELYDQRHYRESLHKGRGIFVNLPLSNQYDGSKLTSYGKYETIDAILNGLHANATMSNLRYLGISSPFGKMQASNGLTIDPDSIICYQSPTGLFERQIKLSDL

SEQ ID NO: 91 - protein, 1239 aa, Lactobacillus buchneri
MTEKRKFDIREVYLAIHHIVKYRGNFLNSATVDSFKTSNIDFTSQFDRLNELYRQVILEEPFQINMNQVDKMTNKLLDNDALKLDTQKQVAKLLPVIYNDKPVDKQYTRLATEFSKAILGYKTKLDVILNLDTQNAKDWAIRLDDEDIDDKLPALVENLDESRQEIVTIIRDLYAQITLNAIVPKGKSLSESMVDKYNDHKDHLDLLMGLIHELGDDSAKGIKLREAYTQYVGKSGDKTLNQDDFYAAIKKNLDEDSKRSPKIQRLIEQASFMPKQRTSANGVIPHQLHQLELDRIIENQGRYYPFLKEPNSNTHKPNGGKYKLDELVAFRIPYYVGPLITKQDQEKTSGADFAWMIRKPGQGGEITPWNFDQEVDRMASANTFIRRMTTKDSYLVAEDVLPDSSLIYEKFKVLNELNMLKVNDRRLSISQKQDLFNNLFKKQKTIRTKKLQTYIRTKWELPSVMISGLSDPDKFNSSLATYIDFRDVFGEKVDDPNRQADYEKIIEWSTVFEDRKIYQAKLNQLDWLTESQSKALLTKHYTGWGRLSKKLLTGLKDQNGDSILDQLWKTNDNFMQIQSRDEFAKQIHDENAKQFHEANNVDDILDDAFTSPQNKKAIRQVDKVVQDVVKAVGYAPDKIAIEFTRSPQDRPQRTFSRQRQLQSTYLNVAKALMKSNLNQELKSVIDSQQTLTDKLYLYFTQLGQDMYTGKEINFDELVNYQIDHILPQAFIKDDSLDNRVLVSAPINNAKSDNVPVKKFGAKMGYFWKQLAENHLISKRKLNNLTTDPDKIGKFTAQGFIHRQLVETSQVIRLVANILGNEYGHDGTTIIEVTAKMNHQMRKDFDLIKIRDVNDYHHAMDAYLTAYVGDYLYLRYPKLRSYFVYGDFKKLKDQSLKIRNFNFLHDLTNDEAGDKIVDQETGEIIWDKHESVKQLKKVYHYKFMLVSQEVYTRQDALFNQTIYPASDADKRKLIPIKNNKPVDVYGGYSGNVDAYMAIVRIHGKKEDKYKVVGVPMRAVADLKKAESKGRDNYLNAVHEVLKPQFTKKKKDRKTGEITEMMDDFDVLLGKVYYRQLIVDGNKKFMLGSSTYQYNAKQLVLSDKAMQVLSKDDKLKNQDENQNLIDVYDEILEKVDQYFELYDINKFRQKLHDGRKKFIELPVDNDFNGKKLISYGKRATIISILNGLHANATMSNLKYLGISSPFGMLQVPNGIILSPASRICYQSPTGLFERKVKLSDL

SEQ ID NO: 92 - protein, 1381 aa, Lactobacillus fermentum
MDYVKEYHIGLDIGTSSIGWAVTDSQFKLMRIKGKTAIGVRLFEEGKTAAERRTFRTTRRRLKRRKWRLHYLDKIFAPHLQEVDENFLRRLKQSNIHPEDPAKNQAFIGKLLFPDLLKKNERGYPTLIKMRDELPVEQRAHYPVTNIYKLREAMINEDRQFDLREVYLAVHHIVKYRGHFLNNASVDKFKVGRIDFDKSFNVLNEAYEELQNGEGSFTIEPSKVEKIGQLLLDTKMRKLDRQKAVAKLLEVKVADKEETKRNKQIATAMSKLVLGYKADFATVAMANGNEWKIDLSSETSEDEIEKFREELSDAQNDILTEITSLFSQIMLNAIVPNGMSISESMMDRYWTHERQLAEVKEYLATQPASARKEFDQVYNKYIGQVPKEKGFDLEKGLKKILSKKENWKEIDELLKAGDFLPKQRTSANGVIPHQMHQQELDRIIEKQAKYYPWLATENPATGERDRHQAKYELDQLVSFRIPYYVGPLVTPEVQKATSGAKFAWAKRKEDGEITPWNLWDKIDRAESAEAFIKRMTVKDTYLLNEDVLPANSLLYQKYNVLNELNNVRVNGRRLSVGIKQDIYTELFKKKKTVKAGDVASLVMAKTRGVNKPSVEGLSDPKKFNSNLATYLDLKSIMGDKVDDNRYQMDLENIIEWRSVFEDGEIFADKLTEVEWLTDEQRSALVKKRYKGWGRLSKKLLTGIVDENGQRIIDLMWNTDQNFMQIVNQPVFKEQIDQLNQKAITNDGMTLRERVESVLDDAYTSPQNKKAIWQVVRVVEDIVKAVGNAPKSISIEFARNEGNKGEITRSRRTQLQKLFEDQAHELVKDTSLTEELEKAPDLSDRYYFYFTQGGKDMYTGDPINFDEISTKYDIDHILPQSFVKDDSLDNRVLVSRAENNKKSDRVPAKLYAAKMKPYWNQLLKQGLITQRKFENLTMDVDQNIKYRSLGFVKRQLVETRQVIKLTANILGSMYQEAGTDIIETRAGLTKQLREEFDLPKVREVNDYHHAVDAYLTTFAGQYLNRRYPKLRSFFVYGEYMKFKHGSDLKLRNFNFFHELMEGDKSQGKVVDQQTGELITTRDEVAKSFDRLLNMKYMLVSKEVHDRSDQLYGATIVTAKESGKLTSPIEIKKNRPVDLYGAYTNGTSAFMTIIKFTGNKPKYKVIGVPTTSAVGLKRVGKPGSESYNQELHRIIKSNPKVKKDFEIVVPHVSYSQLIVDGDCKFTLASDTYQHPATQLVLSKESMEIIADDFKFVKENPATADEQLVRVFDEIVNQMNHYFTIFDQRSNRQKVTKARDKFVSLPTESEYEGAKKTQVGKTEVITNLLMGLHANAAQGDLKVLGLSTFGFFQSSGGLNLSEDAMIVYQSPTGLFERRICLKDI

SEQ ID NO: 93 - protein, 1306 aa, Sphingobacterium spiritivorum
MKHILGLDLGTNSIGWALIKQNFENKQGEILGMGSRIIPMGAELSKFEQGQAQTKNANRRIARGTRKLNKRYKQRRNKLIYILQGLGMLPDQIKLVNQFSDPNKLDKISILPISKNQQQLTAFDLLELRVKALTEKIELEELGKVIYKYNQLRGYSGGNSEPEKEENNEDESEENEKTNDSFVVFSKVLSLGLPEEITFKGKKLSKRKIAIETEDGIIEAETFLDSLKENDSLELHVNIRRAKSGDTITIKLPSKTSWRKKMENIEKQLADKSKELGREYFISELLFDILKENKWAKIRNNVILRSRYESEFDAVWSEQSKYYPILNHLETDRLQKILEFIFPGQKESQEKLRQTGLKEGLKYVIKNQVVFYQRELKDQSDLISNCRYEPTEKVVAKSHPVFQEYKIWEQINKLVINTKIENGVNRKGEIRYKYIDKPIPVALKEWLYEELQSKKEVSFNPILTKLKKEFKLRENVDFLNGMNAKDKLKGNETKVILQKALGELWNIFGLDDSERQVELWEILYNGKGNEYDLTSERTSNILAFIEKYSPDLENKNDVAIKISKIKFSRNYSNLSLKAIDNILPLVRAGKFFDQNFSEALSHKIVKLLNENVEDPFEKSAQEFLDKNQDVLSDGGIVNAIATILVYDKHTAKEYSGDELIKEFTQISRLKQGELRNPLAEQIINEALVIVRDIWRKYGFKPDEIRVELARELKNNAVERGKMYSANLKSQKHNAEIRNKLIELKQEISIANIEKYKLWVSQENLQEVYLKNYNDPSKSEIEKLKLWESQGHISPYTGQPISLSELFNRERYDVDHIIPQSRYFDDSLSNKVICEKSINNEKGNRTSMEYFEVGSVNYRIFTKDQFIDHANKYFSGKKRKNLLATSIPEDPIQRQIKDTQYISIRIREELNKIVGNENVKTTTGGITDYLRNHWGLTDKFKVLLKERYEAVLPKIAQLEYDNYKKETEKKFTEYKNADVEFNEPILDEEIFIEKFRSEFIRKKNNKLIIKGWSKRIDHRHHAMDALVIACTQPAHIKRLNDLNQVLKEWLDKNKEKFFPGFSGTKTELLDEVLNLEEEKRREIFNQLEKFRAIEMPWKGFPEEAEQKLKEVIVSHKPKDKLLLQYDIQGNKQIKLRGQLHEGTLYGLSNGKEIYRIPINKLAGKQFATEKTIEKIVNPFLKNVIEEHLKSFGKKEEAFSAEGILDLNKKLAERKDEQQNPKPHPPISTIKIYYKDPSKSKKKKTDDEDDISLQKLNRKKSFNDSLYVKTGDNYLFAVMEKEVFNKKLNKDKTERHYDLKLFLTLLIF

SEQ ID NO: 94 - protein, 1358 aa, Acidaminococcus sp.
MGKMYYLGLDIGTNSVGYAVTDPSYHLLKFKGEPMWGAHVFAAGNQSAERRSFRTSRRRLDRRQQRVKLVQEIFAPVISPIDPRFFIRLHESALWRDDVAETDKHIFFNDPTYTDKEYYSDYPTIHHLIVDLMESSEKHDPRLVYLAVAWLVAHRGHFLNEVDKDNIGDVLSFDAFYPEFLAFLSDNGVSPWVCESKALQATLLSRNSVNDKYKALKSLIFGSQKPEDNFDANISEDGLIQLLAGKKVKVNKLFPQESNDASFTLNDKEDAIEEILGTLTPDECEWIAHIRRLFDWAIMKHALKDGRTISESKVKLYEQHHHDLTQLKYFVKTYLAKEYDDIFRNVDSETTKNYVAYSYHVKEVKGTLPKNKATQEEFCKYVLGKVKNIECSEADKVDFDEMIQRLTDNSFMPKQVSGENRVIPYQLYYYELKTILNKAASYLPFLTQCGKDAISNQDKLLSIMTFRIPYFVGPLRKDNSEHAWLERKAGKIYPWNFNDKVDLDKSEEAFIRRMTNTCTYYPGEDVLPLDSLIYEKFMILNEINNIRIDGYPISVDVKQQVFGLFEKKRRVTVKDIQNLLLSLGALDKHGKLTGIDTTIHSNYNTYHHFKSLMERGVLTRDDVERIVERMTYSDDTKRVRLWLNNNYGTLTADDVKHISRLRKHDFGRLSKMFLTGLKGVHKETGERASILDFMWNTNDNLMQLLSECYTFSDEITKLQEAYYAKAQLSLNDFLDSMYISNAVKRPIYRTLAVVNDIRKACGTAPKRIFIEMARDGESKKKRSVTRREQIKNLYRSIRKDFQQEVDFLEKILENKSDGQLQSDALYLYFAQLGRDMYTGDPIKLEHIKDQSFYNIDHIYPQSMVKDDSLDNKVLVQSEINGEKSSRYPLDAAIRNKMKPLWDAYYNHGLISLKKYQRLTRSTPFTDDEKWDFINRQLVETRQSTKALAILLKRKFPDTEIVYSKAGLSSDFRHEFGLVKSRNINDLHHAKDAFLAIVTGNVYHERFNRRWFMVNQPYSVKTKTLFTHSIKNGNFVAWNGEEDLGRIVKMLKQNKNTIHFTRFSFDRKEGLFDIQPLKASTGLVPRKAGLDVVKYGGYDKSTAAYYLLVRFTLEDKKTQHKLMMIPVEGLYKARIDHDKEFLTDYAQTTISEILQKDKQKVINIMFPMGTRHIKLNSMISIDGFYLSIGGKSSKGKSVLCHAMVPLIVPHKIECYIKAMESFARKFKENNKLRIVEKFDKITVEDNLNLYELFLQKLQHNPYNKFFSTQFDVLTNGRSTFTKLSPEEQVQTLLNILSIFKTCRSSGCDLKSINGSAQAARIMISADLTGLSKKYSDIRLVEQSASGLFVSKSQNLLEYL

SEQ ID NO: 95 - protein, 653 aa, Oribacterium sinus
MELINSEEFTFKEELEKHTQVAMKQLSEFTYEDLEDSYFSVPVKRMIWQTLLVVREIEKVMGYAPKRIFVEMTRTEEEKGDKGRKESRGNQLLELYKSIKNTDSHNWKEEIAAADKDGKLRSKKLFLYYMQMGRDMYTGEEIDLGRLYDDNLYDIDHIYPRHYVKDDSIMNNLVLVNRRANQDIKKDLYPIPEQIKANPNVHMLWDALHKQKLITDEKYARLTSNTAFSEKQLGDFIARQLVETGQGTKGVADLLEQLFKDTVIVYAKASNVSDFRRDNGFLKSRLVNDFHHAQDAYLNIVVGNVYYTKFTKNPWNFICKDYEKDKEKNRYNLARMFDWNVVRGSETAWIVERKDEKGTISTVRKMMQKNTPLLTRMNFEQHGSIANATLYSAKKAKSENYLPLKTADEKMSDVKKYGGYTSMSIAYYFIVHHKEDKKENVTIEALPLYCKDKVEREENGLEKYCEEVLGYGEVNIIRRKLKIQSLLEFNGYQVHLSGKTGNQLILRNAISLCLSTKWITYIKKLEKAVNIQIVEEVVTPEENIKLYNLLADKHANTVYSKRPNAYGEKLLADREIFVTLEFGKQCEALLQILSLTKIGSTEANLLLIGESEHSGKILISKNLKASDRPAVINQSPCGLYEKKEWIFDKIVEK

SEQ ID NO: 96 - protein, 1436 aa, Capnocytophaga gingivalis
MKYIKYILGLDIGSNSIGWALIQLDLLQKTKRIIAAGSRIIPMDQKVLSDFGKGITISPTAQRTSYRNARHCRERHLLRRERLHRVLHILGFLPTHYDKQIDFSKRYGKFVDNTEPKIAYNEGKFLFMDSFQEMLSDFKSHQPDLFYTKKNGEESKIPYDWTIYYLRKKALSQKISKEELAWIILNFNQKRGYYQLREEEGNKENDFEIISSKIISVIKKDKDKKYNKYWYDIILENGLVYQAAFYNDFVYNWINQDREFIIERTSLKNGAEKVKLSYLPTFDEIDKMDKKEQDKYYKKIKIKTENSIGNKTVGCYIYDHILQNPNEKIKGKLVRTIERKYYKEELKAILEKQIALQPELFTDQLLADCIRELYSKNEAQQRNLAARDFVHLLVEDIIFYQRPLRRQKSTLANCSLESRSYIDKDSHTRKEAPLKVCPKSNPYYQEFRVLQWLQNLKIYEIDSDQEVTHQFIKTLEDKQQLFEFLMAQKEIDCEELLKYFLNQTYPNAKEKALKSELKKWKDTYRWNYVYDIGEKSSKKYPMNETRYELKRHLEKVANLPDDFLSSEVEYLLWHLIYSVKDKVAYEKGLKKFAQKHHLDKDSFVESFKKFNPYPSEYGSFSEKAIRKLLPLMRFGAHWDFNHIDKNTQKRIEDLITGVENEEIRTILREKAEKYQLEKETDFQDLPLWLAQYIVYNRHAEASSLEKWTSVNDLETYLNEFKQHSLRNPIVEQVVMETLRVVRDIWQQYGQGQASFFNEIHIELGRELKKTAKEREKLSKQNQKNEDINLSIKEKLKELEKYNTRAYSITHQEKYKLWLEQKHISPYTGQIISPENLFTDNYEIEHIIPQSRFFDDSLSNKVVCESIVNKAPYKDRQLGLEFIKNQGGRIVKELSKENKTIKIFTEEQYRTFIKEHYSNNPEKTKKLLLEEIPEKMVARQMNDTCYISKFISEILSKIVRSDEQDEGVHSKNVILCTGKITSILRQDWGLNDIWDNLILPRFERMNNLLQKEKFTIYSIEKQKKIPVVPINDQFKSFQKKRIDHRHHAMDAIIIACTTREHINYINNQHALEKEKDKKEKQEERDKLREKLCIKKYNNRSEGNYSWIFKKPWDTFTQEVRVALEDIVVSFKQNLRVINKATNYYERWVEENGKYIKKMVKQEGTNWAIRKPLHEETISGKIYLDREKITKNDILTATRKTVDSSFDDKRIKKITDTGIQKILLNYLKYKGSPEIAFSPEGLEELNKNLSIYNDGKPHKPIYKVRIYEKGSGRFALGEKGRKYKKYVQGASNLYFGIYQGAKRSFATIPLNEVIERQKQGLPSVPEYNEKGDLLLFSLSPNDLVYVPIEGEIIENIDFRNLSKEQKERIYNVNDFSSTCYFTPNRIAKAIFPKEVDLQRKGDKLSGSYDTKTASLEGIQIKEVCIKLKVDRLGNISKA

SEQ ID NO: 97 - protein, 1069 aa, Bacillus cereus
MNYDIGLRIGITSCGWSIINKDLERIEDLGVRVFEKAENPDGTASAAPRREARKSRRKHRRKKHRIERIKRLIVQHDLLSKKELDSLYLSPFNIDVWNLQVEALERKLDNREFARVLIHLVQRRGFQTIRKSVEIQEEGKLLENVSENERIMKVNGYKTVGEMFSKHEKFTHHKRNKDGSYTSVVTRSLLLKEIKTIFNSQRILGNVFSTQKLESDYLYIWGSQRPTLTYEQLMSMVGNCIYEKKEKRAPKTSWAFQYFSLLQKINKLKVSDDNTLRKLSKEERDIVIELAFKKKNVSFVDIRKALKLNDNTKFNHLTYSHVVETKKVEKATFIELKGYHLIKKQLKDRNVELTQELQPKDYDAIAAASTFFKNDIEFRDYLRNQYLDSNGKRKSNIANKVFEDKVIAAVFELNFSKVCHLSFKSLYKLIPHLEKGLDYKEAILCAGYNFRDENKRDKKLFLPVIQQETNPVVHRALTQARKVINAIIREYGSPNTIRFVVANDLAKTYKQRKELESTLKKNRAENEKIKTKLLSMGIINPTGMDIVKYKLWYEQSGICLYTGRQMELSSLFKPGYSIVNHIIPYNRSFDDTYHNRVLTLTETKYEKGNKIPFEYFGAEETCWNEYEKRVSTSKKIHDKKREKLLIRNFDIEYENEMISNNVFDTHYIGSYFEKYIDEHLQFKKSTKKQKVFSIHGNMVAHLHSRWGFNKNSREIYLNHAVDAAIVAVLTDQLIRNIADYYRRDNILEQKGSLKFPEPWKSFSIELEARISPQVRDLIKKLNLDSYLDVDILHIKPVFISKKPRRKVNGEAHKSTIRSLIGINEIGKTVTCIKTRLEDIPFDENGDFPMYGKDTDKYTYTAIKERYLEFNKDKEKAFSTPLYKLKRNGEPGNQIKSVKIIDTRNIVNKVNQGKGIAYNSNIIRVDVFSRDQKYYVVPIYLRDFIKGSLPNKIITAAKGFMQWPETDNSYTFLFSIFPNDLIKVVPKEGKFIKAKNENKENINLTEILGYFKGLDSSTGAFTLESHDGSLLARGIGTKNLLLIEKYQVDVLGRYNKVGNEERQDIKIQQN

SEQ ID NO: 98 - protein, 1391 aa, Lactobacillus jensenii
MKEIKDYIIGLDIGTNSCGYVVTDKQNNILKLKGKTAIGARLFKEGEAAADRRAFRTTRRRLARRRWRLSLLEEIFDEEMNKVDPSFFRRLKESDYSPKDRRKQFNSIVFESSEADKAFYEKYPTIYHLRNALMHDNQKHDLREIFLAVHHIVKYRGNFLREDSVKAFKAAKFTLQGEDGIGPVDKLNDLLKEIYIEAAPELATDNLSKIEDIIKDKKLYKQDKLKQIANLLPKAVDSKDKAKLNKDIAKQVANALMGYMFRLDTLFSFTDVDVKDYKLKFSDANIDESLDALTSLLTDAQIEFVLELQSIYNTIVLNEIVPDGMSLSESMVKKYDDHKKDLKLYKEYIDSLSDQKKAKQLEAAYALYVNYRKADLLAAKKLFEKKKIGDKKFVDVISNFEVFGKFVSDNLDDSELANKIKARLDLGEFLPKQRTNQNGVIPYQLHQVELTQILEKQGKYYPFLITPNPVESHRNNAPYEISELVSFRVPYYVGPLIDNQSIKDKQNKNKFAWMVRQKQGQITPWNFEEMVDTTESANQFIKRMTRKDTYLLAEDVLPKSSLIYQKFMILDELNRIKIDGKKLTSKLKHDIFEKLFKKQKSINLDNLKNYLLAEGNIPGLIEGLSDGINFNNSFSTYIDYRNIFGDEIDNPNKQADFEKMIEWSTVFEDRKIFKRKLKEITWLTPEQIKQVSSKRYSGWGRLSKKLLTQITDENGVNILQRLWNEPETLTEVLANPVIKRKISEANSLFVQINKVENILDDAYTSPQNKKAIRQVIRVVDDIIAAAHGKKPSQIAIEFARSSQNKAKVPDTRKKQLDKIYNKISSEILDSSIKNELKNLKSNKYLSKDKLFLYFKQMGRDAYTGDKLSLDQLQNYDIDHIFPRSFIKDDSLDNRVLTQKPINAKKSDYGIPALEFGNKYVPDLGITVKEMWKLWQENGLISKSKLINLCTNPKKIGSKRASGFINRQLVETSQVIKLVAIILQAEFPDTEIIEVKALQNTTLRESFHLYKNRSVNDYHHAIDAYLTTIVGNYLYQVYPKLRPYFVYGQFKKFNQEKNIDILKRLKNFNFLRQLIFNTDDNIYISGTKEIVFNKKDIIHKLETAYGYKYMNISRECYQETSSLFNQTLYAHNSSVKNSLIPKKKGLPTEIYGGYSGNKDSFFVLVKIVKKRTNLYRIVGIPTRELAKLNSSNNYNQALNKIVESKLCLKETESFKILIKRLLYGTLIVDNGQKFRIGSFKEKHNVQQLVLQLKSMKYIKFYIDGGQNYFTDVERKKLEKQDRDKCLLYVFDDIMNVVNKRFTLFDMSKYEKDGDSLREKFNCLDFNDKVSILSDLLKAFHANSDRTSITKLKITNLGRHQAGKNGITLTTNAQIIYQSPTGLFERRIKIKDL

SEQ ID NO: 99 - protein, 1114 aa, Eubacterium rectale
MNYTEKEKLFMKYILALDIGIASVGWAILDKESETVIEAGSNIFPEASAADNQLRRDMRGAKRNNRRLKTRINDFIKLWENNNLSIPQFKSTEIVGLKVRAITEEITLDELYLILYSYLKHRGISYLEDALDDTVSGSSAYANGLKLNAKELETHYPCEIQQERLNTIGKYRGQSQIINENGEVLDLSNVFTIGAYRKEIQRVFEIQKKYHPELTDEFCDGYMLIFNRKRKYYEGPGNEKSRTDYGRFTTKLDANGNYITEDNIFEKLIGKCSVYPDELRAAAASYTAQEYNVLNDLNNLTINGRKLEENEKHEIVERIKSSNTINMRKIISDCMGENIDDFAGARIDKSGKEIFHKFEVYNKMRKALLEIGIDISNYSREELDEIGYIMTINTDKEAMMEAFQKSWIDLSDDVKQCLINMRKTNGALFNKWQSFSLKIMNELIPEMYAQPKEQMTLLTEMGVTKGTQEEFAGLKYIPVDVVSEDIFNPVVRRSVRISFKILNAVLKKYKALDTIVIEMPRDRNSEEQKKRINDSQKLNEKEMEYIEKKLAVTYGIKLSPSDFSSQKQLSLKLKLWNEQDGICLYSGKTIDPNDIINNPQLFEIDHIIPRSISFDDARSNKVLVYRSENQKKGNQTPYYYLTHSHSEWSFEQYKATVMNLSKKKEYAISRKKIQNLLYSEDITKMDVLKGFINRNINDTSYASRLVLNTIQNFFMANEADTKVKVIKGSYTHQMRCNLKLDKNRDESYSHHAVDAMLIGYSELGYEAYHKLQGEFIDFETGEILRKDMWDENMSDEVYADYLYGKKWANIRNEVVKAEKNVKYWHYVMRKSNRGLCNQTIRGTREYDGKQYKINKLDIRTKEGIKVFAKLAFSKKDSDRERLLVYLNDRRTFDDLCKIYEDYSDAANPFVQYEKETGDIIRKYSKKHNGPRIDKLKYKDGEVGACIDISHKYGFEKGSKKVILESLVPYRMDVYYKEENHSYYLVGVKQSDIKFEKGRNVIDEEAYARILVNEKMIQPGQSRADLENLGFKFKLSFYKNDIIEYEKDGKIYTERLVSRTMPKQRNYIETKPIDKAKFEKQNLVGLGKTKFIKKYRYDILGNKYSCSEEKFTSFC

SEQ ID NO: 100 - protein, 1362 aa, Lactobacillus paracasei
MTKLGKPYGIGVDIGSNSIGFAAVDENSHLIRLKGKTVIGARLFEEGKAAAKRRAGRTTRRRLSRNRWRLSFLRDFFESHITPTDPNFFMRQKYSEISPKDKARYKYEKRLFNDRTDAEFYQQYSTMYHLRNRLMTDPSRADVREIYFAIHHILKSRGHFLTPGDAKDFNTNDVALDEIFPALQDAYAQVYPDLGITFDEDKANEFKTILLNEIATSIDTQRALVKLLLAEEDDKDILKQQKQVLTEFAKAVVGLKTKLNLALGTEVDSSEATAWNFSLGQLDDKWAGIESAMTDEGTEILDQIRDLYRARLLNGIVPTGKTLSQAKVDDYTQHHEDLQLFKAYLKQLEDDGTAKAIRQLYDRYIDGDDAAPFLRENFVKALTKDVTAHPNTKSPELLERLAQPDFMLKQRNKANGAIPVQMQQRELDQIIKNQAVYYDWLAAPNPVEKHRKSMPYQLDELLNFRIPYYVGPLVTAKEQKAAQGGVFAWMVRKDPEGNITPYNFDEKVDREASANTFIQRMKTTDTYLIGEDVLPKQSLLYQRYEVLNELNNVRVNNEKLSIEQKQQVIRELFERHNSVTIKQFAENLRAHGDYAHIPEIRGLADEKRFLSSLSTYRQLKSLLPEAIDDPAKQADIENIIAWSTVFEDAAIFKTKLKEISWLGSEAITKLSNIRYRGWGQFSRKFLNGLTLGNGHTIIQELLLSTNNLMQILTDETLQKKMTELNADKLKTANINDAIDNAYTSPSNKKALRQVLRVVDDIKRAADGQDPSWLYVETADGGGTPGKRTRARQHQLQEIYANAAHELIDTAVRGELEDKISDKADFNDRLVLYFMQGGRDIYTGAPLNIDQLSSYDIDHILPQSLIKDNSLDNRVLVHAIINREKNATFASTIYAQKMNATWRQWHEAGLISGRKLRNLQMRPDQIDKYASGFVARQLVETRQIIKLTEQIVAAQYPDTKIIAVKAGLSHQLREELEFPKNRDVNHYHHAFDAFLAARIGTYLLKRFPNLQAFFTYGKFTKADVKKLRGFNFIRDITHAEDKIVAKDTGEVVWDKQRDVDELDRIYNFKRMLITHEVRFETADLFKQTVYGARDSKEAGGSKQLIPKKKGYPVDIYGGYFRENTAYLAVVKVTKKTETIFKVVKIATSQVAALNKARSRSTAEELSVLTELLKPKFSKVGKNGKITDTPFEVVLPRVPREQLFYNAKYGFFMVNSDTMFHNFQEIWVSRSDQKILQQIRKAKIDYPNVDQDLDNLFHNLADQIVKYFDLYSIAGFKEKISQSQNTFNDLAVDDTDQSVGKITVINELLKGAQANGMTGSLKVLKISTPFGFTQDKSGVLTKDSSIIYQSPTGLFERSVRLTDL

SEQ ID NO: 101 - protein, 1056 aa, Actinobacillus minor
MKALNYILGLDLGIASVGWAVVEIDQNELPIRLIDLGVRTFERAEVPKTGDSLALARRLARSSRRLVRRRAVRLLKAKRLLKQEGILQADDFHSSHLKPLPNNPWELRVKGLNHLLDRKEWAAVLLHLLKHRGYLSQRKNESKTDNKELGALLKGVSENRQLLQAQAFSTPAEIAIKKFQQEEGHIRNQRGAYSHTFDRNDLLAELRLLFQKQREFNNPYTSQSLEQAIAELLMWQKPALSGEAILKMLGKCTFEPSEYKAPKNSYSAEYFVWLTKLNNLRILENGADRGLTAEERQLLINQPFEKAKFTYAQARKLLELSDLAIFKGVRYGKDNAESATLMEMKAWHAIRKALESNGLKTEWNGLKTKPELLDKIGTAFSIYKTDEDISQYLNGELSPAVLNALLENLSFDKFIRLSLQSLAKILPLMEQGLRYDEACKQVYGDHYGKKEQLELRFLPKIPVEDIRNPVVLRTLSQARKVINGVVRLYGSPARIHIETGREVGKSFSERRDISKRQEENRNERQRAVEKFKEFFPHFVGEPKAKDILKMRLYEQQHGKCLYSGKELDLNRLLEKGYVEIDHALPFSRTWDDSFNNKVLVLASENQNKGNQTPYEWLNGKENAERWKLFQALVNGSRFPYSKKQRILTKYLDEDGFRERNLNDTRYVARFLCNFIEDNMQLVGQGKKRVFASNGQITALLRRSWGIQKVREDNDRHHAVDAVVVACSTRALQKKITDYVRYKEMNVFTGEKIDQETGEIIKFHFPEPWKFFRQEVEIRVFSETPAEDVVIALPDRPQANHEFIQPLFVSRAPTRKMTGQGHMETIKSAKRLAEGLSVSRVPLTQLKLKDLENMVNREREKALYEALKVRLEKFNNDPAKAFADPFYKKGGQQVKAVRVEQVQKSGVLVRQENGVADNASMVRVDVFIKGGKYFLVPIYTWQVAKGILPNRAATQGKEEEYWDIMDETAIFQFSLYQNDLIKLVTKKKTIFGYFNGLNRATSNINIKEHDLDKSKGKDGIYLEVGVKLALSLEKYQVDELGKNIQPCRSMKKRPPVR

SEQ ID NO: 102 - protein, 1081 aa, Neisseria flavescens
MTAFKPNPINYILGLDIGIASVGWAMVEIDEEENPIRLIDLGVRVFERAEVPKTGDSLAAARRLARSVRRLTRRRAHRLLRARRLLKREGVLQAADFDENGLIKSLPNTPWQLRAAALDRKLTPLEWSAVLLHLIKHRGYLSQRKNEGETADKELGALLKGVADNAHALQTGDFRTPAELAVNKFEKESGHIRNQRGDYSHTFSRKDLQAELVLLFEKQKEFGNPHISDGLKEGIETLLMAQRPALSGDAVQKMLGYCTFEPTEPKAAKNTYTAERFIWLTKLNNLRILEQGSERPLTDTERATLIDMPYKNKLTYAKARELLGLDDTAFFKGLRYGKDNAESATLMEMKAYHAIRRALEKEGLKDKKSPLSLSPELQDEIGTAFSLFKTDEDITGRLKGCLQPEILDALLKHINFDKFVQISLKALRRIVPLMEQGKRYDEACAETYGDHYGEKNSEEMLYLPPIPADEIRNPVVLRALSQARKVINGVVRRYGSPARIHIETAREVGKSFKDRKEIEKRQEENRKDREKAAAKFREYFPNFVGEPKSKDILKLRLYEQQHGKCLYSGKAIDIRRLNGKGYVEIDHALPFSRTWDDSFNNKVLVLGSENQNKGNRTPYEYLNGKDNSREWLEFKARVETSRFPHSKKQRVLLQKFDEKGFKERNLNDTRYVNRFLCQFVADHMQLTGKGKRRVFASNGQITNLLRGFWGLHKVRAENDRHHALDAVVVACSTVAMQQKITCFVRYKEMNAFDGKTVDKETGEVLHQKTHFPQPWEFFAQEVMIRVFGKPDGKPEFEEADTPEKLRALLAEKLSSRPEAVHEYVTPLFVSRAPNRKMSGAHKDTLRSAKRFVKHNEKISVKRVWLTEIKLADLENMVNYKNGREIELYEALKARLGAYGGNAKQAFDPKDNPFYKKGGQLVKAVRVEKTQESGVLLNKKNAYTIADNGDMVRVDVFCKVDKKGKNQYFIVPIYAWQVAENILPDIDCKGYRIDDSYTFCFSLHKYDLIAFQKDEKSKVEFAYYINCDSSNGRFYLAWHDKGSKEQQFRISTQNLVLMQKYQIDELGKEIRPCRLKKRPPVR

SEQ ID NO: 103 - protein, 1392 aa, Gemella haemolysans
MANKTWYLGLDIGSASVGWAATDTGYKIIRKNKKRLWGVRLFEEAKTAEDRRGYRSSRRRLARRKWRLNLLEELFTSEVKKVDENFFLRLKESQYHYEDKTHKVPYAIFNDKDYTDKDYYKDYPTIYHLRSKLMTEENPDIRKVFLAIHHIIKNRGHFLLQGQSFKDGNLNNLIKELLELDILHVGFEVTEEVVDKIADISLEKKTSKDKLNDIKELYPKEKQLLEVFRLIFGGKTSLDKLFAIDEYKELDAAIKSVSFKEKIYEEVRHDYEQVLSNYIELLDLAKLVYDSIILSDIKKEGKTLSESKVELFEKHRDDLLKLKNLVKNDSKLSEDKKVELYALIFKEDKDKGTNYVNYIRKSEEGKGCNYEDFKKFLVKELAKLEESSVKTEIIKDLELEQFLPLQRTKDNSVVPYQIHKEELVKILDNAARYHSFLNEKDESGYNVREKVIQLLEFRIPYYVGPLNSSKKAKEGGFAWSVRNTGYENTPVTPWNYSKVIDESASAEKFITNLTNKCTYLKGEDVLPKSSLLYSEFALLNELNALKYDGNRISLEARNTIIEKLFKQQGKKVTKTSIKNLLKAEGYIDGKGEITGIDITVKNDLKSYRDFKKILGNKFNSEHVENIILWITLYGESRKLIKAKIESVYGEVYSKDEITKMSRLVYKDWGRFSRKLLTELVSKKLYNEETGECLNIIGAMRQNNILFMELLADRFDYSKQIVEFNKELQEDVTEIAPEILDDLYVSPAVKRSIWQTVRIVEELKKIIGCAPAKIFVETTRSNQEKKKPTDSRKKQLELAYKAVKKDVKELEKEIGTINFDVLNDRLSSVEPSKLKAKKLYLYYTQLGRCMYSEEPINISELFDNNKYDIDHIYPQSKIKDDSFTNTVLVKRESNAAKTDRYPLGSDIQTPSNRRFWKFLKEKGLISDEKYNRLVRTEEFSDEELSGFIARQLVETSQSVKAVASILGELNPETSICYSKAENVSSFRQNFGKIKKGDRDSKNNDQLIKVREINDYHHAKDAYLNVVVGNVYDTKFTRNVFNFIKDKKDGRKYSLNKVFYENVSDSKTVAWEMDKTIHQVEKVMNNNNIMVTRRTSEQKGGLFDATVYKAKVAAKAKDGVYYPLKTSNSVVKDVAKYGGYTSIGIAYYSIFEYTIVNKKGEEKITRIIPIPIYISQNIKDSTALIEFGKSQIFCRAYEKIKDFKLLYRKLCIGSKININNYQYYIGGKSDERFYYDSAIQVTLDKKSEKYLKILSKYQNWKKENKDGELWENITKENNIELYNKLVEKMNSEIFTKKKSNKYNELNSEEIRNNFIKISVEEQAKVLLEILNLLTNKKSIFDLKSIDIKAARGKISFNLTSLIQFSIIEQSITGFYEKEITIIGDKGNDMENNNS

SEQ ID NO: 104 - protein, 702 aa, Helicobacter pullorum
MRKILKIDERIQFKEVDYTAKNPENKKFVEFKNLKKFCEILGAIVGDRALADSIARDMTLIKDEEELAQKLRGYGKFSQEQITQLSALHFSHHISLSLKALSEILPFMREGMRYDEACQEAKLQAKHNDKKSKFLPPFCESIYADELTNPVVHRAIAEYRKILNALIAKYGSVHKIHIELTRDVGKNFQEREKYKKEIESNYKARVQAMQECEKLGLTLSEGNILKLRLFREQNEICVYSGRKITLANLKEQGALEIDHILPYSRSSDDSYMNKVLVFTNENQNKGNKTPYEAFGGDSQKWGEIESLALRSGYPKKKAKRILDKGFGDREAGFKSRNIVDSGYIARLIANYTKEYLKFLPLDSHENTALIAGEKDSKIHVEAVKGMLTATMRHFWGLGSKNRYEHTHHAVDAIIIAYINAAMIQRFSQFRQNQESLKARFYAKELAKEEFKTQRAFFEPFSGFREQVLAKVGQIFVSRPPRKRARGALHEETFYSIDDKKLSETYGGKKGVQRALSLGKIRQIGTKIVANGPMVRVDIFKHTQSGRFYAVPIYTMDFALGILPNKAVVSGKDKDRIIKDWLEMDSCYEFCFSLFKDDVIEVQKRDMEKPELAYFVSLDASDGRIKVRHHCNDITKINENQKKLFSEAIEKEVVGRGSIQNLKVFKKYKVSPLGEIKEAKYEPRQPIALKTSPKKHRKQNNAQ

SEQ ID NO: 105 - protein, 1371 aa, Streptococcus dysgalactiae
MDKKYSIGLDIGTNSVGWAVITDDYKVPSKKFKVLGNTDRHSIKKNLIGALLFDSGETAEATRLKRTARRRYTRRKNRIRYLQEIFSSEMSKVDDSFFHRLEESFLVEEDKKHERHPIFGNIVDEVAYHEKYPTIYHLRKKLADSTDKADLRLIYLALAHMIKFRGHFLIEGDLNPDNSDMDKLFIQLVQTYNQLFEENPINASRVDAKAILSARLSKSRRLENLIAQLPGEKRNGLFGNLIALSLGLTPNFKSNFDLAEDAKLQLSKDTYDDDLDNLLAQIGDQYADLFLAAKNLSDAILLSDILRVNSEITKAPLSASMIKRYDEHHQDLTLLKALVRQQLPEKYKEIFFDQSKNGYAGYIDGGASQEEFYKFIKPILEKMDGTEELLAKLNREDLLRKQRTFDNGSIPHQIHLGELHAILRRQEDFYPFLKDNREKIEKILTFRIPYYVGPLARGNSRFAWMTRKSEETITPWNFEEVVDKGASAQSFIERMTNFDKNLPNEKVLPKHSLLYEYFTVYNELTKVKYVTEGMRKPEFLSGKQKEAIVDLLFKTNRKVTVKQLKEDYFKKIECFDSVEISGVEDRFNASLGTYHDLLKIIKDKDFLDNEENEDILEDIVLTLTLFEDKEMIEERLKKYANLFDDKVMKQLKRRHYTGWGRLSRKLINGIRDKQSGKTILDFLKSDGFANRNFMQLINDDSLTFKEAIQKAQVSGQGHSLHEQIANLAGSPAIKKGILQSVKVVDELVKVMGHKPENIVIEMARENQTTQKGQKNSRERMKRIEEGIKELGSQILKEHPVENTQLQNEKLYLYYLQNGRDMYVDQELDINRLSDYDVDHIVPQSFIKDDSIDNKILTRSDKNRGKSDNVPSEEVVKKMKNYWRQLLNAKLITQRKFDNLTKAERGGLSELDKAGFIKRQLVETRQITKHVAQILDSRMNTKYDENDKLIREVKVITLKSKLVSDFRKDFQFYKVREINNYHHAHDAYLNAVVGTALIKKYTKLESEFVYGDYKVYDVRKMIAKSEQEIGKATAKRFFYSNIMNFFKTEITLANGEIRKRPLIETNEETGEIVWDKGRDFATVRKVLSMPQVNIVKKTEVQTGALTNESIYARGSFDKLISRKHRFESSKYGGFGSPTVTYSVLVVAKSKVQDGKVKKIKTGKELIGMTLLDKLVFEKNPLKFIEDKGYGNVQIDKCIKLPKYSLFEFENGTRRMLASVMANNNSRGDLQKANEMFLPAKLVTLLYHAHKIESSKELEHEAYILDHYNDLYQLLSYIERFASLYVDVEKNISKVKELFSNIESYSISEICSSVINLLTLTASGAPADFKFLGTTIPRKRYGSPQSILSSTLIHQSITGLYETRIDLSQLGGD

SEQ ID NO: 106 - protein, 1007 aa, Helicobacter canadensis
MKVLGFDIGINSIGWAFVENNELKDCGVRLFTKAENPKTKESLALPRRNARSSRVRLRRRRSRLLSLKHIISKEFGLHYEDYIALDGNLPKAYTGKIESIYKLRYEALSQAISKEDLARVILHIAKHRGYMNKNQKTSQDSEKGAILSAIKENSNKIKHYQTAGEYFYKELFENLRDGTKEFKNIRNKAMKNEKTGNMESTYYNTILASDLEKELKLILEKQQAYHNYSDTFIKEVLEIAFYQRPLKDFSHLVGSCTFYENEKRACKNSYSAWEFIALGKIINTLESIKKDTGEIFSNEIITQILKEVLDKGSLSYTKLRKMINLDEKVKFKGLKYDKEGVEKTNLIEFKKLKEFKKALGEHNLERKTLDEIATHITLTKDENQLKKQLEQYALSQNQIDALAELDFNDHINLSFKALYEILPLMEKGKRYDEACNELGLKAKTSNQKSEFLPAFCDSIFAQELTNPIVNRAISEYRKVLNRLLKKYGKMHKIHIELARDAGLSKEARNKIEKEQKENKDINDKAEKTCKEFGLKPNAKNILKIKLWREQGEICAYSGKKITIDDLKEDKALEVDHIYPYSRSYDDSYNNKVLVFIKENQLKLNQTPYEAFGSNQEKWSKIQVLAQKLPYKKKNRILDENFKNKDQIEFISRNLNDTRYATSLIAKYTKEYLEFLPLSDDEDISLKSGEKGSKTHVQTMNGMLTSVLRHAWGFSQKDRNNHLHHALDAIIIAYSTNSIIKAFSDFKKNQEILKAKLYAKKLTSEEYKNQSKFTGFEKYRSKILEKLDSIFVSKPPNKNTKGALHEQTFYSYQDILEEYKTQEGLKRALECGKVRKIGTKYVVNDRMVRLDIFKKDNKFYGIPIYTMDFALGVLPNKVVTIGTDKDKIKKEWKTIDETYEFCFSLYKGDLVLIQKKEMQESEFAYYNGFDISSASISLEKHDNKFENLTENQKLLFPKAKEGDVEVRGIGIQGLKVFKKYMVTPLGEIQETRTEARQNIQPRKKHGLR

SEQ ID NO: 107 - protein, 1397 aa, gamma proteobacterium
MTKNYISPIAIDLGAKFTGVALYQYLEGADCTQEVAKGLLVDDRGNVTWSQEGRRGKRHQVRGYKRRKMAKRLLWLILDSEYGIKREEVTEPLLKFINGLLNRRGYTYISEEVDEESMNVSPLPFSEMMPDYFNSSAPLLEQLAKLLSDKNKLVRFRAEGKIPSNKNEFKKLLDTALDGKYKDEKKELSEAWGNILIASENVLKSTVDGHKSRSEYLANIKEDIKSNEELEKQISSKEIDGFYNLVGHLSNFQLRLLRKYFNDPNMSGVSYWDEKRLEKYFYQWVQGWHTKGGTDEAEKKNIILKTKGAPLLKTLKSLSADLTIPPYEDQNNRRPPKCQSVLLSDEKLTMHYPKWKEWVGQLVKQNDNAYLNENVTLANALHRIVERSRSIDPYQLRLLISITDAEKRNDLAGYKRLKLSLGSEVDEFLLLVKNIVDETKEAREGLWFETENKLFFKCGKTPPRKEKLKSTLLSAVLGKNLSDDEQSSFIEEFWKSGTPKIERRNVRGWCRLASQVQKTYGVYLKEYGLQQLHKLEAGKKLDDKPLALLYKNSGLIASKIGEALNIEPDEVSRFASPHSLAQIFNIIEGDVAGFNKTCRACTYENIWRMQEEKVESLLTNQLLSEIHGERKVPLKSAMCTRLSADSTRPFDGQMASIIEHIARKIAQHKIAQINDVPKEFSIDIPIIIESNQFSFTAELEEIKRGRGSAKAKKAKELGEKSKAGWVSKTERIKTSSEGICPYTGAPLGGSGEIDHIIPRSLTGRTKKTVFNSEANLIYCSSKGNHDKGNRVYVIEQLNDKYLKKQFSTSDVNLIKKKIKTTIQRFTEGGEKLRSFSELSREDQKAFRHALFVPELKSEVTSLLAVKNITRVNGTQAWLAKKIASLLAEHLDKQGRDYTLSAHQIDPWSVSKQRKMLASAEPIWAKKDPQPAASHVVDAVCTFLEALEQPHTASRLKTISSTSFEKTGWRSALIPDLIKVDALDRRPKYRRYNIGSTSLFKDGIYAERFLPILIDENGLMAGYDIDNSLKAKGADVVFESLSPFLLFKGEEVGAQSLSDWQERIDGRYLYMSIDKVKAFDYLQEKVGEKDIAAELLNSIHFTQRKTELRAKFSDDSGKKMKTLDAIRKSLKLTVTVNEIGKRKEKCGFSGTIGIPAKSAWENLLDEPLLETYWGTKMPPQEIWEKVYRKHFPRNIPNQAHRKVRKDFSLPVVDSVSGGFRVKRKTPNGYNYQLLAIDGYSAVGFKKEGDNVDFKSPALVPQIAESKSVTPISSELVHLDKNEIVYFDEWRKIDISDSDLKQFVSSLELAPGSQNRFYIRFTVDEDQFERHFKSALRVNGIQDLDTVNKTFDWNREIPSLLIPPRSNLFLLETGQKITFEYIANGANAEVKKAYSLRRA

SEQ ID NO: 108 - protein, 1082 aa, Neisseria meningitidis
MAAFKPNPINYILGLDIGIASVGWAMVEIDEEENPIRLIDLGVRVFERAEVPKTGDSLAMVRRLARSVRRLTRRRAHRLLRARRLLKREGVLQAADFDENGLIKSLPNTPWQLRAAALDRKLTPLEWSAVLLHLIKHRGYLSQRKNEGETADKELGALLKGVADNAHALQTGDFRTPAELALNKFEKESGHIRNQRGDYSHTFSRKDLQAELILLFEKQKEFGNPHISGGLKEGIETLLMTQRPALSGDAVQKMLGHCTFEPAEPKAAKNTYTAERFIWLTKLNNLRILEQGSERPLTDTERATLMDEPYRKSKLTYAQARKLLGLEDTAFFKGLRYGKDNAEASTLMEMKAYHAISRALEKEGLKDKKSPLNLSPELQDEIGTAFSLFKTDEDITGRLKDRIQPEILEALLKHISFDKFVQISLKALRRIVPLMEQGKRYDEACAEIYGDHYGKKNTEEKIYLPPIPADEIRNPVVLRALSQARKVINGVVRRYGSPARIHIETAREVGKSFKDRKEIEKRQEENRKDREKAAAKFREYFPNFVGEPKSKDILKLRLYEQQHGKCLYSGKEINLGRLNEKGYVEIDHALPFSRTWDDSFNNKVLVLGSENQNKGNQTPYEYFNGKDNSREWQEFKARVETSRFPRSKKQRILLQKFDEDGFKERNLNDTRYVNRFLCQFVADRMRLTGKGKKRVFASNGQITNLLRGFWGLRKVRAENDRHHALDAVVVACSTVAMQQKITRFVRYKEMNAFDGKTIDKETGEVLHQKTHFPQPWEFFAQEVMIRVFGKPDGKPEFEEADTPEKLRTLLAEKLSSRPEAVHEYVTPLFVSRAPNRKMSGQGHMETVKSAKRLDEGVSVLRVPLTQLKLKDLEKMVNREREPKLYEALKARLEAHKDDPAKAFAEPFYKYDKAGNRTQQVKAVRVEQVQKTGVWVRNHNGIADNATMVRVDVFEKGDKYYLVPIYSWQVAKGILPDRAVVQGKDEEDWQLIDDSFNFKFSLHPNDLVEVITKKARMFGYFASCHRGTGNINIRIHDLDHKIGKNGILEGIGVKTALSFQKYQIDELGKEIRPCRLKKRPPVR

SEQ ID NO: 109 - protein, 1334 aa, Listeria monocytogenes
MKKPYTIGLDIGTNSVGWAVLTDQYDLVKRKMKISGDSEKKQIKKNFWGVRLFEKGETAAKRRMSRTARRRIERRRNRISYLQEIFAIQMNEVDDNFFNRLKESFYAESDKKYNRHPFFGTVEEEVAYYKDFPTIYHLRKELIDSQKKADLRLVYLALAHIIKYRGHFLIEGALDTKNTSIDEMFKQFLQIYNQVFANDIEEASLKKTEKNQEVAQILAEKFTRKDKLDKILSLYPGEKTTGVFAQFVNIIVGSTGKFKKHFNLHEKKDINCAEDTYDTDLESLLAIIGDEFAEVFVAAKNAYNAVVLSNIITVTDSTTRAKLSASLIERFENHKEDLKKMKRFVRTYLPEKYDEIFDDTEKHGYAGYISGKTKQADFYKYMKATLEKIEGADYFIAKIEEENFLRKQRTFDNGVIPHQLHLEELEAILHQQAKYYPFLREDYEKIKSLVTFRIPYFVGPLAKGQSEFAWLTRKADGEIRPWNIEEKVDFGKSAVDFIEKMTNKDTYLPKENVLPKHSLCYQKYMVYNELTKVRYIDDQGKTNYFSGQEKQQIFNDLFKQKRKVKKKDLELFLRNINQIESPTIEGLEDSFNASYATYHDLLKVGMKQEILDNPLNTEMLEDIVKILTVFEDKRMIKEQLQQFSDVLDGTVLKKLERRHYTGWGRLSAKLLVGIRDKQSHLTILDYLMNDDGLNRNLMQLINDSNLSFKSIIEKEQVSTTDKDLQSIVAELAGSPAIKKGILQSLKIVDELVSVMGYPPQTIVVEMARENQTTNKGKNNSKPRYKSLEKAIKEFGSQILKEHPTDNQELKNNRLYLYYLQNGKDMYTGQELDIHNLSNYDIDHIVPQSFITDNSVDNLVLTSSAGNREKGDNVPPLEIVQKRKIFWEKLYQGNLMSKRKFDYLTKAERGGLTEADKARFIHRQLVETRQITKNVANILHQRFNYKTDGNKDTMETVRIVTLKSALVSQFRKQFQFYKVREVNDYHHAHDAYLNGVVANTLLKVYPQLEPEFVYGEYHQFGWFKANKATAKKQFYTNIMLFFAQKDRIIDENGEILWDKRYLETVKKVLGYRQMNIVKKTEIQKGEFSNVTPNPKGKSNKLIPRKKDWDPIKYGGFDGSKMAYAIIIEYEKQKRKVRIEKKLIQINIMEREAFEKDEKTFLEEKGYHQPKVLIKVPKYTLYECKNGRRRMLGSANEAHKGNQMLLPNHLMALLYHAEKYEAIDGESLAYIEVHRALFDELLAYISEFARKYTLSNDRLDEINMLYERNKDGDVKSIAESFVSLKKFNAFGVHQDFSFFGTKIERKRDRKLNELLNSTIIYQSITGLYESRKRLDN

SEQ ID NO: 110 - protein, 1337 aa, Enterococcus faecalis
MKKDYVIGLDIGTNSVGWAVMTEDYQLVKKKMPIYGNTEKKKIKKNFWGVRLFEEGHTAEDRRLKRTARRRISRRRNRLRYLQAFFEEAMTALDENFFARLQESFLVPEDKKWHRHPIFAKLEDEVAYHETYPTIYHLRKKLADSSEQADLRLIYLALAHIVKYRGHFLIEGKLSTENISVKEQFQQFMIIYNQTFVNGESRLVSAPLPESVLIEEELTEKASRTKKSEKVLQQFPQEKANGLFGQFLKLMVGNKADFKKVFGLEEEAKITYASESYEEDLEGILAKVGDEYSDVFLAAKNVYDAVELSTILADSDKKSHAKLSSSMIVRFTEHQEDLKKFKRFIRENCPDEYDNLFKNEQKDGYAGYIAHAGKVSQLKFYQYVKKIIQDIAGAEYFLEKIAQENFLRKQRTFDNGVIPHQIHLAELQAIIHRQAAYYPFLKENQEKIEQLVTFRIPYYIGPLSKGDASTFAWLKRQSEEPIRPWNLQETVDLDQSATAFIERMTNFDTYLSSEKVLPKHSLLYEKFMVFNELTKISYTDDRGIKANFSGKEKEKIFDYLFKTRRKVKKKDIIQFYRNEYNTEIVTLSGLEEDQFNASFSTYQDLLKCGLTRAELDHPDNAEKLEDIIKILTIFEDRQRIRTQLSTFKGQFSAEVLKKLERKHYTGWGRLSKKLINGIYDKESGKTILGYLIKDDGVSKHYNRNFMQLINDSQLSFKNAIQKAQSSEHEETLSETVNELAGSPAIKKGIYQSLKIVDELVAIMGYAPKRIVVEMARENQTTSTGKRRSIQRLKIVEKAMAEIGSNLLKEQPTTNEQLRDTRLFLYYMQNGKDMYTGDELSLHRLSHYDIDHIIPQSFMKDDSLDNLVLVGSTENRGKSDDVPSKEVVKDMKAYWEKLYAAGLISQRKFQRLTKGEQGGLTLEDKAHFIQRQLVETRQITKNVAGILDQRYNANSKEKKVQIITLKASLTSQFRSIFGLYKVREVNDYHHGQDAYLNCVVATTLLKVYPNLAPEFVYGEYPKFQAFKENKATAKAIIYTNLLRFFTEDEPRFTKDGEILWSNSYLKTIKKELNYHQMNIVKKVEVQKGGFSKESIKPKGPSNKLIPVKNGLDPQKYGGFDSPVVAYTVLFTHEKGKKPLIKQEILGITIMEKTRFEQNPILFLEEKGFLRPRVLMKLPKYTLYEFPEGRRRLLASAKEAQKGNQMVLPEHLLTLLYHAKQCLLPNQSESLAYVEQHQPEFQEILERVVDFAEVHTLAKSKVQQIVKLFEANQTADVKEIAASFIQLMQFNAMGAPSTFKFFQKDIERARYTSIKEIFDATIIYQSTTGLYETRRKVVD

SEQ ID NO: 111 - protein, 1426 aa, Capnocytophaga ochracea
MKNILGLDLGTTSIGFAHIVEDENKEKSEIKELGVRIVSLTTDEQSDFEKGKSITTNANRTLKHGARLNLDRYQQRRKYLIDLLQKANLITPSSILAENGKNTTHSTWQLRAKAVTERIEKEEFARILLAINKKRGYKSSRKAKTEDEGQAIDGMAIAKRLYDENLTPGQLSLQLLQQNKKLLPDFYRSDLQKEFDLVWNFQKQFYPDILTDIFYKELQGKGKDATSKAFSKRYHFDTTENKGSKESVRLQAYQWRAEAISKQLSKEEVAYVLTEINNNLNNASGYLGAISDRSKELYFNRQTVGQYLYAKLQENRHNSLKNKVFYRQDYLDEFERIWETQASFHKELTDELKKQIRDVVIFYQRKPKSQKGLISFCEFESKEIEIEKDGKTITKNIGARVVPKSSPLFQEFKIWQILNNVICKRKGIRKKKISAKTTQLDLLNESSQTIFSLDMECKQLLFDELNLKGDLKSDKVLKLLGYSPQEWEINYNQLEGNRTQKALYEAYLKIVEMEAHDVKDILQIKSAKDDWSLDESPLSASEIREKVKAIFQTLGICTKILYFDPLLPVKEFEEQDSYQLWHLLYSYESDDSTSGNETLYRILEKKYAFKREHARILANVALQDDYGSLSTKAIRKIYPNIKENQYSTACEKAGYKHSKLSLTTEELEARELKNIIPLLKKNALRNPVVEKILNQMINVVNALIEKNSERDAEGKITKYFHFDEIRIELARELKKNAQKRYEMTQNINKAKLEHQKISEILQKEFGIKNPTKSDIIRYRLYQELEHNGYKELYTNAPIARDMLFSKNIEIEHIVPKARVFDDSFSNKTLTFHRINSDKGEYTAFDYITSLNSEEELNQYLTRVENAYKTKSISPTKYKNLLKKASEIGDDFINRDLRDTQYIAKKAKEILFQVTKNVLSTSGSITDRLREDWGLVDVMKELNMPKYQSLGLTEVEERKDGNKVTVIKNWTKRNDHRHHAMDALTVAFTKPSYIQYLNHLNARKDENNKNYSVILAIEEKETIKVPTNNGKNKRVFIEPIPNFRQVAKKHLEEIFISHKAKNKVVTKNTNKPAGTDKQQITLTPRGQLHKETIYGKYQYYINKEEKIGVKFDERTIAKVSNPVYREALLKRLQANDNDPKKAFAGKNALSKNPIYLDESKTKTLPEKVNLTYLEEDFSIRKDISPDNFKDLKSIEKVIDQGVKRILIKRLQAYDNDPKKAFVDLEKNPIWLNKEKGIAIKRVTISGVNNAQPLHIGKDHLGKTTLNKEGKEIPVDYVSTGNNHHVAIYRDKEGNLQEQIVSFFDAVVRAQQGIPIIDKTYKQAEGWQFLFTMKQNEMFVFPNATTGFNPAEIDLLDPKNKKLISPNLFRVQKIATKDYFFRHHLETNVETDNILKNVTWKREGLSGLKDIVKVRINHLGDIVSIGEY

SEQ ID NO: 112 - protein, 1424 aa, Parabacteroides sp.
MKRILGLDLGTNSIGWALVNEAETDEEVSSIIRLGVRVNPLTVDETQNFEKGKSITTNAERTLKRSMRRNLQRYKLRRDALVEFLKELGFITDETILSEQGNRTTFETCRLRAKAAEEEISLEELSRVLLMINKKRGYKSSRKVKKEEDGVLIDGMEIAKKLYEEDLTPGQLCSQLLESGKKVLPDFYRSDLQEELDRIWSVQKQFHPDVFCDAAKEEIKGKNRSQTWAILANYFVWKEEVVGWNDREAKNETIEKECKLVGLKRTTKGYELKKENYRWRAQALTEQLGLEEIAVVLQEINGQINASSGYLGAISDRSKVLYFNHQTVGQYQMAELDKNPHASLRNMVFYRQDYLDEFDRIWEKQAEFHKELTAELKKEIRDMIIFYQRRLKSQKGLISFCEFERLEIVVEKDGKKQTKVIGCKVIPRSHPLFQEFKVWQTLNDIKVLGREKKRNALSASESRALYPEEKEILARELAIKENMKKADVLKLLFENPQELDLNFKQIDGNRTGFSLFSAYSKMIEKYGYEPLDFKKPADEIIGQLRTIFTDLGWNTNLFTIDLTKEGKELEMQPYFRLWHLLYSFEGDNTSTGNGKLIEKIMQLCGVEKEYAVELASLSFQDDYGSLSAKAIKRILPYLKEGNLYDVACEYAGYRHSKSSLTKEEIENKVLKGKLEVLPKNSLRNPVVEKILSQMVNVINTIIDTYGKPDEIRVELARELKKSAKEREELTKAIAKSTREHEEIRKLLQDEFGMMNVSRNDIIRYKLYEELKDNGYKTLYSNQYIPKEKIFSKEIDIEHIIPQSRLFDDSLSNKTLEYKAINIEKGNKTAYDFVKEKYGEEGLQQYINRCESLFNDKKAKLRKLKMEQKDIPDGFIDRDLRNTQYIAKKALAMLNEICRRVVATTGSITDQLREDWQLVDVMKELNLPKYEALGFVETYEDKDGRKIKRIKDWTKRNDHRHHAMDALTVAFTKDAFIQYFNNKNAAQDSGNRNHTNIIGIKTRYFDKGRALPPIPLEQFRIEAKQHLEKLLVSIKAKNKVVTVNVNRTKKRKGENTKIQQTPRGQLHLETVYGSHKQYVTKIEKVNASFDAAKIATVSKRAYRNALLKRLETFGNDPKKAFTGKNALEKNPLYADKYQTIRVPEKVQTVEFETIYTIRKPVDPALNVDKVVDVKVRAILERRLKEYGGDPKKAFVNFWENPIWLNKEKGISIKRVSIRGINNAQSIHVKKDKNGNPIWDENGKQIPVDFVNTGNNHHVAIYRKPVLDKKGQVTFDEDGNLMYELDEVVVPFFEAVTRANLGLPIIDKDYRKSEGWQFLFSMKQNEYFVFPNEKTGFNPKEVDLLNPDNYAMISPNLFRVQTMSKVMYGNNVVRDYKFRHHLETTVKDMKELKDIAYKQYKTLSFGNSVVKIRINHIGQIVSVGEY

SEQ ID NO: 113 - protein, 1395 aa, Lactobacillus jensenii
MKEIKDYIIGLDIGTNSCGYVVTDKQNNILKLKGKTAIGARLFKEGQAAADRRSFRTTRRRLARRHWRLGLLEEIFDPEMEKIDPNFFRRLKESDYSPKDSRKQFNAIVFKSIKADKRFYKKYPTIYHLRNALMHDNQKHDLREIFMAVHHIVKYRGNFLREDSVNAFKAAKFSLRGEDGIGPVDKLNDLLKEIYSEYSPELATNNLSKIEDIIKDKNLYKQDKLKQVATLLIKEADSKDKAKLNKDIAKQVANSFMGYMFRLDTLFSLTDVDVKDYKLKFSDANIDESLDDLTSLLTDAQIEFVLELQSIYNTIVLNEIVPDGMSLSESMIKKYDDHKEDLKIFKEYIDSLSDQKKAKKLLSAYNLYVNYRKSDLVEAKNLFKNKKVGDKNFADVISNFEVFGKFVSDNLDDSELANKIKARLDLGEFLPKQRTNQNGVIPYQLHQVELTQILEKQGKYYPFLITPNPVESHRNNAPYEISELVSFRVPYYVGPLIDNQSIKDKQNKNKFAWMVRQKQGQITPWNLEEMVDTTESANQFIKRMTRKDTYLLAEDVLPKSSLVYQKFMILDELNRIKIDGKKLTSELKHDIFEKLFKKQKSINLDNLKNYLLVEGNIPGLIEGLSDGINFNNSFSTYIDYRNIFGDEIDNPNKQADFEKMIEWSTVFEDRKIFKRKLKEITWLTSEQIKQVSSKRYSGWGRLSKKLLTQITDENGVNILQRLWNEPETLTEVLANPVIKRKIVEANSSFTKAKDMKDILVEAYTSPQNKKAIRQVMRVVDDIIAAAHGKKPSQIAIEFAREDQDNPQMTKSRKAQLDQIYAKISDEFLDDAVKNELKNMKDNKPLAKDKVFLYFKQMGRDAYSGEKLSLDNLQDYDIDHIYPQSFIKDDSFDNRVLVQRAYNNGKSDNVPVLLFGNKIAAGLGITIRQMWKKWLELGLISKRKFNNLITDPEKISRNMASGFVNRQLVETSQVIKLVANILQAKLPDTEIIEVKASYNSILRKEFNLYKSREVNDYHHAIDAYLTTIVGNYLYQVYPKLRPYFVYGQFKKFGKAENQEDDPVKKIKKFNFIYQLIWGKDDAICISHTNQQVFSKKDIIDKLTTAYNFKYMNISHAVYTRNNNMFKQTLFPIIERTTAKTKSLIPKKLDRPTDIYGGYSNNNDAYLALVKVDKKRGSEYRVVGIPMRAAAMLKASKNYDEDLRKVIEPMVMFDKNGKAKRGIEGFRVLVGKMPFKQAVLDGNKKFMLTGTVDTPNLKQLVLSQQNMKYILDYIEDVDCRKHKFGDKVQNPDKCLLEVFDEIIEIVDKYFELFDSRDFREKLRNSRNKFIKLEASKKADTILAILKGLQAKSTRATIKELNISDFGRIITSSISPEAQLIYQSPTGLFERRVKVKDL

SEQ ID NO: 114 - protein, 1140 aa, Roseburia intestinalis
MRENGSDERRRNMDEKMDYRIGLDIGIASVGWAVLQNNSDDEPVRIVDLGVRIFDTAEIPKTGESLAGPRRAARTTRRRLRRRKHRLDRIKWLFENQGLINIDDFLKRYNMAGLPDVYQLRYEALDRKLTDEELAQVLLHIAKHRGFRSTRKAETAAKENGAVLKATDENQKRMQEKGYRTVGEMIYLDEAFRTGCSWSEKGYILTPRNKAENYQHTMLRAMLVEEVKEIFSSQRRLGNEKATEELEEKYLEIMTSQRSFDLGPGMQPDGKPSPYAMEGFSDRVGKCTFLGDQGELRGAKGTYTAEYFVALQKINHTKLVNQDGETRNFTEEERRALTLLLFTQKEVKYAAVRKKLGLPEDILFYNLNYKKAATKEEQQKENQNTEKAKFIGMPYYHDYKKCLEERVKYLTENEVRDLFDEIGMILTCYKNDDSRTERLAKLGLVPIEMEGLLAYTPTKFQHLSMKAMRNIIPFLEKGMTYDKACEEAGYDFKADSKGTKQKLLTGENVNQTINEITNPVVKRSVSQTVKVINAIIRTYGSPQAINIELAREMSKTFEERRKIKGDMEKRQKNNEDVKKQIQELGKLSPTGQDILKYRLWQEQQGICMYSGKTIPLEELFKPGYDIDHILPYSITFDDSFRNKVLVTSQENRQKGNRTPYEYMGNDEQRWNEFETRVKTTIRDYKKQQKLLKKHFSEEERSEFKERNLTDTKYITTVIYNMIRQNLEMAPLNRPEKKKQVRAVNGAITAYLRKRWGLPQKNRETDTHHAMDAVVIACCTDGMIQKISRYTKVRERCYSKGTEFVDAETGEIFRPEDYSRAEWDEIFGVHIPKPWETFRAELDVRMGDDPKGFLDTHSDVALELDYPEYIYENLRPIFVSRMPNHKVTGAAHADTIRSPRHFKDEGIVLTKTALTDLKLDKDGEIDGYYNPQSDLLLYEALKKQLLLYGNDAKKAFAQDFHKPKADGTEGPVVRKVKIQKKQTMGVFVDSGNGIAENGGMVRIDVFRVNGKYYFVPVYTADVVKKVLPNRASTAHKPYGEWKVMEDKDFLFSLYSRDLIHIKSKKDIPIKMVNGGMEGIKETYAYYIGADISAANIQGIAHDSRYKFRGLGIQSLDVLEKCQIDVLGHVSVVRSEKRMGFS

SEQ ID NO: 115 - protein, 992 aa, Treponema vincentii
MQKNSGEDENCGFEFLTEEEKELIKPLFFRISKPSFQFADIEKKLKGKNGFWKFNYRKDTNVSGCPVSAGLKNIFGDEASAESWKDKKVGQYDMCDIWHVLFDFDDEEKLLEFAKRKLFLSDEAAKKFCAIRIQQGYANLSLKAIRKITPFLRKGYIYSTAVFLANIPFMIGRDIFLQNEKEIEDSVKNIIGTLRDKNNIIVLANRCIESAFKDKDNDFRFEEWDKALVENSAWDLFGKKKWNEYDEEKRKTIISQVSEKVEDNLKIAVGKNPNDYKYPLLRTDDLIMDYLNQKGFVVKGELYHPSDTDYNFETPVPAEDGKIYLASPRSPSVKNPVVMRALHQLRKLVNYLIKTGKIDSTTKINVELANDVNDKNQRKAIEELAKTNEKNNADARKKIEELCNEAGFKVVPTESDIKKFRLWKEQNETCPYTGKHISFTDLFGPIPKFDFEHTIPRSLSYDDSLENLTLCDSEFNRNIKKQRLPSELPDFEEINKRFLKFYEDKIDNCLRIIELNSKSGGSYEEPAVKDLRIVKKHKAQYELNYYKEKLRRFSSTEITSGFKHSQLNDTRIITKFSLSYLKGVFDHVQPVKGSMTDTFKRQWGLMERNEIKDRSNHTHHTVDALTVACINRGKFNLLSEAIKNSSDGKHLKFPKPWETFDTDVLNAVRYIIPKYFSDESSLRQSKKILRGRDGKPVLKNGKAVFIQGATARGSLHKDTFYGCIKTVPEKGGKSEMIFVQRIPVSTLDEKVAEKIIDKRIRKTFEKNLSTGIQTLQEIQTDGILLPFKKEGRDVFVKRVRIKAHPTSPIILKKHHNVINKNPKDYKQNYYVENEENYLLAIYRGKDAKGKDVSDHKLCNLLNAVKSRQNKTGFYPDFKEKKGINLQLYKVLKIGKIVILQNDIQEDVFALPKEKLWKRMYRIAGLATSRNDIQIKLVHIIRETPWGYMKGEKDLNAGKECLLYGTANFKGLVEGQDFTVSPAGEIIQKARVC

SEQ ID NO: 116 - protein, 1340 aa, Enterococcus faecium
MKKEYTIGLDIGTNSVGWSVLTDDYRLVSKKMKVAGNTEKSSTKKNFWGVRLFDEGQTAEARRSKRTARRRLARRRQRILELQKIFAPEILKIDEHFFARLNESFLVPDEKKQSRHPVFATIKQEKSYHQTYPTIYHLRQALADSSEKADIRLVYLAMAHLLKYRGHFLIEGELNTENSSVTETFRQFLSTYNQQFSEAGDKQTEKLDEAVDCSFVFTEKMSKTKKAETLLKYFPHEKSNGYLSQFIKLMVGNQGNFKNVFGLEEEAKLQFSKETYEEDLEELLEKIGDDYIDLFVQAKNVYDAVLLSEILSDSTKNTRAKLSAGMIRRYDAHKEDLVLLKRFVKENLPKKYRAFFGDNSVNGYAGYIEGHATQEAFYKFVKKELTGIRGSEVFLTKIEQENFLRKQRTFDNGVIPHQIHLSELRAIIANQKKHYPFLKEEQEKLESLLTFKIPYYVGPLAKKQENSPFAWLIRKSEEKIKPWNLPEIVDMEGSAVRFIERMINTDMYMPHNKVLPKNSLLYQKFSIYNELTKVRYQDERGQMNYFSSIEKKEIFHELFEKNRKVTKKDLQEFLYLKYDIKHAELSGIEKAFNASYTTYHDFLTMSENKREMKQWLEDPELASMFEEIIKTLTVFEDREMIKTRLSHHEATLGKHIIKKLTKKHYTGWGRLSKELIQGIRDKQSNKTILDYLINDDDFPHHRNRNFMQLINDDSLSFKKEIKKAQMITDTENLEEIVKELTGSPAIKKGILQSLKIVDEIVGIMGYEPANIVVEMARENQTTGRGLKSSRPRLKALEESLKDFGSQLLKEYPTDNSSLQKDRLYLYYLQNGRDMYTGAPLDIHRLSDYDIDHIIPRSFTTDNSIDNKVLVSSKENRLKKDDVPSEKVVKKMRSFWYDLYSSKLISKRKLDNLTKIKLTEEDKAGFIKRQLVETRQITKHVAGILHHRFNKAEDTNDPIRKVRIITLKSALVSQFRNRFGIYKVREINEYHHAHDAYLNGVVALALLKKYPQLAPEFVYGEYLKFNAHKANKATVKKEFYSNIMKFFESDTPVCDENGEIFWDKSKSIAQVKKVINHHHMNIVKKTEIQKGGFSKETVEPKKDSSKLLPRKNNWDPAKYGGLGSPNVAYTVAFTYEKGKARKRTNALEGITIMEREAFEQSPVLFLKNKGYEQAEIEMKLPKYALFELENGRKRMVASNKEAQKANSFLLPEHLVTLLYHAKQYDEISHKESFDYVNEHHKEFSEVFARVLEFAGKYTLAEKNIEKLEKIYKENQTDDLAKLASSFVNLMQFNAMGAPADFKFFDVTIPRKRYTSLTEIWQSTIIHQSITGLYETRIRMGK

SEQ ID NO: 117 - protein, 1363 aa, Lactobacillus rhamnosus
MTKLNQPYGIGLDIGSNSIGFAVVDANSHLLRLKGETAIGARLFREGQSAADRRGSRTTRRRLSRTRWRLSFLRDFFAPHITKIDPDFFLRQKYSEISPKDKDRFKYEKRLFNDRTDAEFYEDYPSMYHLRLHLMTHTHKADPREIFLAIHHILKSRGHFLTPGAAKDFNTDKVDLEDIFPALTEAYAQVYPDLELTFDLAKADDFKAKLLDEQATPSDTQKALVNLLLSSDGEKEIVKKRKQVLTEFAKAITGLKTKFNLALGTEVDEADASNWQFSMGQLDDKWSNIETSMTDQGTEIFEQIQELYRARLLNGIVPAGMSLSQAKVADYGQHKEDLELFKTYLKKLNDHELAKTIRGLYDRYINGDDAKPFLREDFVKALTKEVTAHPNEVSEQLLNRMGQANFMLKQRTKANGAIPIQLQQRELDQIIANQSKYYDWLAAPNPVEAHRWKMPYQLDELLNFHIPYYVGPLITPKQQAESGENVFAWMVRKDPSGNITPYNFDEKVDREASANTFIQRMKTTDTYLIGEDVLPKQSLLYQKYEVLNELNNVRINNECLGTDQKQRLIREVFERHSSVTIKQVADNLVAHGDFARRPEIRGLADEKRFLSSLSTYHQLKEILHEAIDDPTKLLDIENIITWSTVFEDHTIFETKLAEIEWLDPKKINELSGIRYRGWGQFSRKLLDGLKLGNGHTVIQELMLSNHNLMQILADETLKETMTELNQDKLKTDDIEDVINDAYTSPSNKKALRQVLRVVEDIKHAANGQDPSWLFIETADGTGTAGKRTQSRQKQIQTVYANAAQELIDSAVRGELEDKIADKASFTDRLVLYFMQGGRDIYTGAPLNIDQLSHYDIDHILPQSLIKDDSLDNRVLVNATINREKNNVFASTLFAGKMKATWRKWHEAGLISGRKLRNLMLRPDEIDKFAKGFVARQLVETRQIIKLTEQIAAAQYPNTKIIAVKAGLSHQLREELDFPKNRDVNHYHHAFDAFLAARIGTYLLKRYPKLAPFFTYGEFAKVDVKKFREFNFIGALTHAKKNIIAKDTGEIVWDKERDIRELDRIYNFKRMLITHEVYFETADLFKQTIYAAKDSKERGGSKQLIPKKQGYPTQVYGGYTQESGSYNALVRVAEADTTAYQVIKISAQNASKIASANLKSREKGKQLLNEIVVKQLAKRRKNWKPSANSFKIVIPRFGMGTLFQNAKYGLFMVNSDTYYRNYQELWLSRENQKLLKKLFSIKYEKTQMNHDALQVYKAIIDQVEKFFKLYDINQFRAKLSDAIERFEKLPINTDGNKIGKTETLRQILIGLQANGTRSNVKNLGIKTDLGLLQVGSGIKLDKDTQIVYQSPSGLFKRRIPLADL

SEQ ID NO: 118 - protein, 1234 aa, Prevotella tannerae
MPNFWSIFTENLQTYLMKTRILGLDTGTNSLGWAVVDRDENNQYTPICRGDLIFTEGVKQEKGIEFSLAAERTSYRASRRHYFRRRLRKVEVLKVLVKHKLCPPLSDEALNRWHTKKEYPLDEDFILWQRTNEADNKNPYHDRHICLHRKLNLKDSQTDRYTLGRALYHLTQRRGFLSNRLDQNEEAEETGKVKSAISELSKEMKEAGCEFLGDYFYLLYRTEGNRVRIRSRYTDREKHYLQEFKEICRVQELDEDLAKALEKTIFFQRPLKSQRQGVGKCTMEKGHSRCAVSHPLYEEYRLLCYLNNIRIKTPSDDRLRPLNAEEREKITPLFYKEKNFDFEKIAKKLAGKTPFGWIRDAEDWPYQFNYRMTQEAPACPTTAQLIKVFGEDWKAALAETYTMSAKQDGTLKTEDEICTDIWNVLYSFSSKEKLKEFGLKKLQLDEVQAKAFSEIRLTRDFASLSLKAIRKILFFLRTGEDYSKAIFLANIPTIVGEEIWNDIERRSRLLYKVDLALRPQEERDAEEHRTIAERIKAAVAAEVPDAPIDLLYHPSMIEAYPDAKRNERFDCYQLGSPKTNAVRNPMAMRSLHMVRKVINHLLRKHIIDEKTEIHIEYARELNDANKRQAIADWQRELSKRHTAYAQNIRQLYKAETGLVIEPTKADILKYQLWEEQQHVCLYTGKKIGIADFLGANPKFDIEHTIPRSRGGDSTQENLTLCESKFNRDIKRDKLPTELANYEEILARIEHWKKQCYALKLKRDGIRTHSGLEKSIKDSRIRRRHLVGLEYGYLKGKYDRFTMKEVPEGFSRRQGAGIGLISKYAGLFLKSLFKDPKNPNRSNVYVVKGAITAEFRKLWGLQQADEAKSRENHTHHCIDAYTIACIGPCEYAALAAYYRSDEEFKYGRRREKPQFEKPWPTFTEDLLKLQEELLIVHQTTDKLGKRDRRKVKTPRGKFLTGGDSARGRLHQETYYGAINYDGNIKYVVRKPLDSLTEKDLDKIVDETVMGIVKGAVEAKGSLKEALADGIYMNKEKGILIKRVRIFSDVSEPINLKQLRDVSTKEYKRHIHLRKDENYLFAIYEGIDKKKNKKQTETATVDYLDAAKFYKDSKRRDKANSLVGDYSKKNKLPLKCILKKRQMVLFYEHSPEEIRFKDKKDLSRRLYIVTSIAKDGRVKFLHHQAATATGIQSSPSPFTNDGEHQPYYRLSASNIKVLVAGIDFDINILGEITPKL

SEQ ID NO: 119 - protein, 1496 aa, Prevotella veroralis
MKTILGLDLGTNSIGWAKVCVDDNGNYLRDIKLGSRIIPMSQDVLGNFDKGVTESQTSVRTGFRGVRRIRERSLLRRERLHRVLHVLGYLPPHYDSAIGWNKNEPSTYGKFLNHGEPKLAWEHKEDGSMRFLFMESFHEMMADFAKSQPSLVSDGKKIPLDWTIYYLRKKALSQPIRKEELAWLLLNFNQKRGYYQLRGEEDDDNPTKCEEYYELKVVGIEADEEGKNGNTWYNVKLENGWIYRRQSKIPLDDWIGKVREFIVTTEYEKDGITLKKDKNGDVKRSFRSPSEDDWGLRKKRTEKLLDSSKMTVGAFVYDHLLAEPSDKIRGKFIRTIERKYYKKELYAILCEQSKYHEELRSGDYLNKCAEELYKNNQPHRNSLLTKDLAYLLLEDLIFYQRPLKTKKSLIAECPYEAYKYVDKETGEIKRQGIKCIAKSNPYYQEFRLWQFISNLRLFNKADDKEVTADYLPTQDDYVRLFAYLNDRKEINQETLLKEFFKLKKITVNSEKVFPIRWNYIEDKEKKYPCNETRHELLLALDRARIDHSWLEKPGQEYRLWHLLYSVESKEETKEALRKLKDDDAFVESFLKVKPFKREYGAYSEKAIKKLLAVMRMGSLWRETDICDTTKGNITKILQGEIDEKLKEKISASVSSYNQLSDFQGLPVWLACYVVYGRHSEAAEIQHWKTPESLLAYINGFKQHSLRNPIVEQCILETLRTVHDIWKEVGHIDEIHVELGRNMKSTADQRARISENVLRNENTNLRIKSLLLELKNDPNIKDVRPYSPMQQEKLRIYEEGVLQELTKDDKDFTEITKISTMAQPSAKELQRYKLWLEQKYRSPYTGKSISLTKLFTSAYQIEHVIPQSRYFDDSFSNKVICESEVNSLKDNMLGYEFIKNHGGEIIHCTMLGDVKVLSESEYKAFVNDHYAHNKRKRENLLLEDIPQEFLNRQMNDSRYISKVVKALLSNIVRAEGEEEATSKFVVSCSGGITDRLKKDWGLNDVWNKIVYPRFERLNRLTGTEAFGQWENKDGKRVFQTAVPLELQRGFNKKRIDHRHHAMDALVIACTSRNIINYLNNESANNPKKREDLRQKLCDKNRTIRKPWETFTQDATAALEDVIVSFKNYVRIINKATNYYERYDVEGKKVIAEQRGDDMWAIRKPMHEATYYGRVNLRRKKKVNLRVALENISSICDNKLRIYINGLVEKGFNTKQILDKFKNTNDHFSMQKIDKVEIWQFTNEEEKLVATRKPLDTSFDTKKIASITDTGIQTILLNYLETKGGDSTIAFTPEGIVEMNQNISKYNNGKEHMPILKVRLYTKLGKKIPVGQTGCKAKQFVIAEAGTNLYFAIYEDEEGKRSYRTIPLNEVVERLKQGLSPVPEKNDKDVHLKFYLSPNDLVYVPIEDEHESLAKDHIYKFVDSSGTTANFIPHRSANVIFELNKKDAEKFCSGSIIQNEYGVGSSQSKNQKAITGEMIKAVCRKLEVDRLGNVIKVI

SEQ ID NO: 120 - protein, 1082 aa, Neisseria cinerea
MAAFKPNPMNYILGLDIGIASVGWAIVEIDEEENPIRLIDLGVRVFERAEVPKTGDSLAAARRLARSVRRLTRRRAHRLLRARRLLKREGVLQAADFDENGLIKSLPNTPWQLRAAALDRKLTPLEWSAVLLHLIKHRGYLSQRKNEGETADKELGALLKGVADNTHALQTGDFRTPAELALNKFEKESGHIRNQRGDYSHTFNRKDLQAELNLLFEKQKEFGNPHVSDGLKEGIETLLMTQRPALSGDAVQKMLGHCTFEPTEPKAAKNTYTAERFVWLTKLNNLRILEQGSERPLTDTERATLMDEPYRKSKLTYAQARKLLDLDDTAFFKGLRYGKDNAEASTLMEMKAYHAISRALEKEGLKDKKSPLNLSPELQDEIGTAFSLFKTDEDITGRLKDRVQPEILEALLKHISFDKFVQISLKALRRIVPLMEQGNRYDEACTEIYGDHYGKKNTEEKIYLPPIPADEIRNPVVLRALSQARKVINGVVRRYGSPARIHIETAREVGKSFKDRKEIEKRQEENRKDREKSAAKFREYFPNFVGEPKSKDILKLRLYEQQHGKCLYSGKEINLGRLNEKGYVEIDHALPFSRTWDDSFNNKVLALGSENQNKGNQTPYEYFNGKDNSREWQEFKARVETSRFPRSKKQRILLQKFDEDGFKERNLNDTRYINRFLCQFVADHMLLTGKGKRRVFASNGQITNLLRGFWGLRKVRAENDRHHALDAVVVACSTIAMQQKITRFVRYKEMNAFDGKTIDKETGEVLHQKAHFPQPWEFFAQEVMIRVFGKPDGKPEFEEADTPEKLRTLLAEKLSSRPEAVHKYVTPLFISRAPNRKMSGQGHMETVKSAKRLDEGISVLRVPLTQLKLKDLEKMVNREREPKLYEALKARLEAHKDDPAKAFAEPFYKYDKAGNRTQQVKAVRVEQVQKTGVWVHNHNGIADNATIVRVDVFEKGGKYYLVPIYSWQVAKGILPDRAVVQGKDEEDWTVMDDSFEFKFVLYANDLIKLTAKKNEFLGYFVSLNRATGAIDIRTHDTDSTKGKNGIFQSVGVKTALSFQKYQIDELGKEIRPCRLKKRPPVR

SEQ ID NO: 121 - protein, 1512 aa, Fibrobacter succinogenes
MKKILGLDLGTNSIGWAVVNADEITRDDGSRYLKPNGISAAGSRIIPMSADILGDFEKGNSISQTAERTRMRMARRLHERALLRRERLLRVLNLLDFLPKHFADKIDRYGKFTDDSEPKLAWRKNTEGKYEFIFQDAFNEMLAEFKDKQPEIVEEGKKIPYDWTIYYLRKKALEKALSKEELSWILLQFNQKRGYYQLRGEEEEIPQDKKIEYLAQKVVKVEATDQKKGDDVWYNVYLENGMIYRRTSKAPLDWEGKVKEFIVTTEVENDGETPKKDKEGNIKRSFRAPKEDDWTLLKKKTEADIENSHKTVGCYIYDSLLNNPKQKIIGKLVRTVERKFYKEELTQILKKQVELIPELRDDNLYKQCIEELYPINEAHRNTIAKTDFANLFINDILFYQRPLKSKKSQIDNCPYEERIFIDSKTGEKKKVPVKCIAKSNPLFQEFRLWQFIQNLRIYQREKEIDGKLLTDIDITSECLKSEEDYVRLFDWLNDRETIEQEDLLKHLFNTKKSKNKENPYRWNYVEDKVYPCNETRATILKGFSKCGINASVLSPELEMALWHILYSVEDKKEIETALTHFAQKQGWNDDFAKVFSKAKPFKKDYGSYSEKAIKKLLSLMRMGKYWNQDNIDKNTLDRIDKIINGEYDEKISNRVRDNAINLKDISDFRGLPVWLACYIVYDRHSEAKDCTKWNSPEEIDSYLKKFKQHSLRNPIVEQVVTETLRTVRDIWIQEEQIDEIHLELGRDLKNPADKRKKMSENILKNENTNLRIKAMLMEFMNPSMGIENVRPYSPSQQDILRIYEENALDNLTKDDKDFDFISKISKQAQPSKTDIIRYKCWLEQKYRSPYTGKTISLSKLFTPAYEIEHVIPQSLYFDDSFSNKVICEAEVNKLKDRQLGYKFIAEHHGEKVQLSQGEVVEILSVDAYEKFVKENYANNRIKMKKLLMESIPDEFIERQLNDSRYISKVVKGLLSNIVREKIDDENYEPEAVSKNLISCNGAITDRLKKDWGMNDVWNSIILPRFIRMNQITGKDCFTTTNAEGHLIPQMPLELQKGFNKKRIDHRHHAMDAIVIACTTRDHVNLLNNEAAHSKFNATRYQLQRKLRRFEKAVIDGKEREVAKEFLKPWDSFSSDSKNILENIIVSFKQNQRVINKTTNAFLHFDENGKKTFIKQGKGDSWAIRKSMHKDTVFGEINLRKVRSVSLNEAIKVPERVLNKKIKEKILELKNNKIDAKNIKKYIEENHTGGYGIDSSKIDVFYFTKETKERFFATRKTLDTSFNQAKIKDSIADSGIQKILLAHLKSKNGDAEQAFSPDGIDEMNKNIVELNNGKFHQPILKVRVYEKADKFAVGQKGNKKVKFVEAAKGTNLFFAIFEKDGKRSYLTIPLNVMIDCQKQYGNQWKNNIEAYLKEKELVEKDVKLQFILSPNDLVYLPTEGSIDKKRIYKVVSFTNNRLYAIPYAIAKSIVDKNEFTQLNKIEFTDNKESIKDACVPVIIDRLGNVIEFNGKRL

SEQ ID NO: 122 - protein, 1259 aa, Streptobacillus moniliformis
MKYILGLDLGVASIGWAVTEINEKGEPVGLIDANSVIFKPLDNDKGKLYNVERRDKRGSRRILRRKKHRVERTKMLLVNSSFLTNEEIDNLYVGKLDNIYEVRLKGLKEQLSKNEIARLMIYYCKNRGFKSNRKTEDLEILKSLGEKISEKDSDEKKLKPIIAKNTELIESKGLTPIEVIYMIRENDNSILGFKNKEGNYKFGFKRNQVIDEVRKILGTQQILSKEIVDEYIDILSSQRDFSDGPGGDSKYKIDYTKLAGKCKYTGEVRAVKSAPSYEIFTMLQKLNDIRYVKFTSEDKIEKKKLSKEVIHKLYDLVVEKNKTLTYDLIEKSIDEENIKLLNIPKLSKSKYVELRKSYFKERNDNENLTEEEINAFNEKLNNERMKQELIRNNLKAYKELKSKFKKNNIDENRIKELGGIYFLDLVAELLTYSKTDEKLEYFVENVERYSLFKEQRDIVEIIKTFPNYTKNGNLSLSLVRELNKLLMEGHDYESSLSSLNYYIDTDVDWEKFPTISEIEDSLSTKITNPNVKHILVILRKLYNTLLFKYGRPEKVHLELSRDFSNDFSTRNKIQKEQLENKVRREVAAFEMYGANKDIVAGKDRLSNDDFVRIKLWEEQNKVCMYSGRTIEKYQLTSAEVQIDHILPYSKSFDNSYSNKVLVFSNENQDKKERTPYQWLKGTEKWNEFKQRVRLNLNISNKKKENLLFEDEVVNNEFLERELHATSYSSRLALNIFQRLIPVSDEDKYDEHGNEKVKYLYNRNVIAFQGKMTSMLRNLYSLNKYTHSFESDTLDIDNKAFILKEFEINKDNLKMTAYNVNTGLEITSETKVEKNKSGEFKTIKDELLKKELDKKENLIEISDYFKDKVLFDLKIVDFEEIDTVEPEIISILYKMITALKEEVYSKNRENHLHHSLDAFLLTIMNRSMQMKLIKYNQLISVLKNKEIEIFNEEKGEYIDSKEFAEELQKQKIIDIDGNERGIKFNVNGKTHRLNLVKPYENFLDDIKNKIFDKRENNKLPYHVVKSKVSGALHAETILGESKGEITKRISVFDINYKNLGKIFDKDGSQKEIYETLVKWLEAKSKDYPKLKNGNIIKKVKIVDGNKDKLIKLGNKRYVEMGRTTVKILVLKKEAEEGLKFASIGRYKYNLLKSEKDVNISIWKDAIHFCKVRYNKLKENGYRLIHELIPGETIELELNKGNISKCLVVGFSGGKIEISSVIGDALDLINDKISTRIKERYYITVSTIKSIKKINKNILGD

SEQ ID NO: 123 - protein, 1091 aa, Mobiluncus mulieris
MDSRKYRVGIDVGTNSVGFAAVEEDDSGSPTRFLNTMVVIHDSGVDPEQKKYAITRLASAGTARRTRRLYRTRRQRLRELDDFISNELGYPLVNLENFADPYEPWKVRADLATTKLPNDELPEAMSIALRHMARHRGWRSPYQRVEALHLHAEISKEFAALKERVVEKTGDVFSDDATPAEVLVDLMGRQKVRGADGVLSGKLRQSDNANELRKIASVQGIDDETLNRIIDRVFSSKSPKGKASERVGMDALPGQGSKPRALKAMPSFQKFRVVSVICNLRIKDSGGDARPLSMEEKEKLIDYLMSSTTDDHVTWTDVADLLHVKRSQLQGTAKEGFDGERPYTRPPVNSTWSKIKDSKIKSLVALWKTGDVDVQSAIVEALSNASVLEDSRPGADIVVAYLESLDDKELESLDKVGLPAGRASYSEDSLERLTERMLRDDCDLFEARKREFNVADDWKPPADPIYAPVGNPGVDRVLKIVNRLLMAAEREWGAPTQINIEHVRSGFSSELMQREFERENERRRAQNEEAVKAILTEKGGNSRVSKYDITRYYAVKRQHCQCLYCGTPITFSDCELDHIVPRKGVGSTNTRVNLAAACRSCNRDKSNLPFAVWAGKASNFDVSIDDAVSRVKQWQRSQNEGVREFRAFQNEVISRLLKTTEDPEIDSRSLESVAWMARELHHRVEYYFQSKGAQTQVSVYRGAVTAQARKSSGLEDKVKMIGGGGKTRLDRRHHAMDAATIALMTPGISTTLSEKNNLRDAQKFTGQSETWKDYCGRTETARKHFAVWKSNMERLTDLFNDKLENDAIPVVQPLRLRLSNSKAHDDGIGKLDSKKLGSVWSLADIDRAATPQIWTALTRCDDFDPTKGLPENANRVIRAQGVKYESEDNIPVFPSNVAAIAVRDGYAEIGSTIHHARIYRIDDGKKTFYSMIRVFAVDLLKHQAEDLFTVKLPPSAISIRTCEDSLRRALSNGTAEYLGWLVPGDEIIVDTSDKAFHTGQIGDLLRNFPVNSFRLTGFPSNSRLRLKPVLLAGEGLRDDAEDSIKKILLGQGWRPAINVLFSKGKPRIVRRNSLGIERPSSNNGLPFSWEA

SEQ ID NO: 124 - protein, 872 aa, Candidatus Parvarchaeum
MLGSSRYLRYNLTSFEGKEPFLIMGYYKEYNKELSSKAQKEFNDQISEFNSYYKLGIDLGDKTGIAIVKGNKIILAKTLIDLHSQKLDKRREARRNRRTRLSRKKRLARLRSWVMRQKVGNQRLPDPYKIMHDNKYWSIYNKSNSANKKNWIDLLIHSNSLSADDFVRGLTIIFRKRGYLAFKYLSRLSDKEFEKYIDNLKPPISKYEYDEDLEELSSRVENGEIEEKKFEGLKNKLDKIDKESKDFQVKQREEVKKELEDLVDLFAKSVDNKIDKARWKRELNNLLDKKVRKIRFDNRFILKCKIKGCNKNTPKKEKVRDFELKMVLNNARSDYQISDEDLNSFRNEVINIFQKKENLKKGELKGVTIEDLRKQLNKTFNKAKIKKGIREQIRSIVFEKISGRSKFCKEHLKEFSEKPAPSDRINYGVNSAREQHDFRVLNFIDKKIFKDKLIDPSKLRYITIESPEPETEKLEKGQISEKSFETLKEKLAKETGGIDIYTGEKLKKDFEIEHIFPRARMGPSIRENEVASNLETNKEKADRTPWEWFGQDEKRWSEFEKRVTSLYSKKKISERKREILLNKSNEYPGLNPTELSRIPSTLSDFVESIRKMFVKYGYEEPQTLVQKGKPIIQVVRGRDTQALRWRWHALDSNIIPEKDRKSSFNHAEDAVIAACMPPYYLRQKIFREEAKIKRKVSNKEKEVTRPDMPTKKIAPNWSEFMKTRNEPVIEVIGKVKPSWKNSIMDQTFYKYLLKPFKDNLIKIPNVKNTYKWIGVNGQTDSLSLPSKVLSISNKKVDSSTVLLVHDKKGGKRNWVPKSIGGLLVYITPKDGPKRIVQVKPATQGLLIYRNEDGRVDAVREFINPVIEMYNNG

SEQ ID NO: 125 - protein, 1229 aa, Pediococcus acidilactici
MGDRKYNLGLDIGTSSIGFAAVDENNQPIRVKGKTAIGVRLFEEGKTAADRRGFRTTRRRLSRRRWRINLLNEIFDAHLAEVDPTFLARLKESNRSNLDPKKSFQGSLLFPERKDYQFYEEYPTIYHLRKALMEKDRKFDIREIYLAVHHIIKYRGNFLNGTPMRSFKVENIELNTLFDQLNQLYAEIVPDNELAFDLAQVADVKDVLSSTTIYKMDKKKQLVKMMLLPASNKALQSENKKIVTQFVNAILNYKFKLDVLLQVETDADWSLKLNDEGADDKLEEFTGDLDENRLEIIDLLQRLHNWFSLNEITKDGNSLSAAMVEKYENHHHHLGLLKKVIENHPDAKKAKALKETYTAYVGKTDDKTQNQDDFYKAVEKNLDDSPDAKGIKRLIQLDQFMPKQRTGQNGAIPHQLHQQELDQIIEKQSKYYPFLAEPNPNVKRRKDAPYKLDELIAFKIPYYVGPLVTPEEQAQNKENVFAWMKRKAAGPITPWNFDEKVDRMESANRFIRRMTTKDTYLFGEDVLPAESMIYQKFVVLNELNNLKINGRHLSLKDKQDVYNDLFKQQKTVSIKALQNYYVTKKKAATAPTVGGLADPKKFLSSLSTYIDFKNMFGERVNDPQFQEDLEQIVEWSTIFEDRGIFKAKLQALGWLSEKQIQQLVAKRYKGWGRLSKKLLTGLKNAEGYSILDEMWRSTENFMQIQSRPEFAALIQQANEKQFEGNDPDNVWENIENILGDAYTSPQNKKAIRQVVKVVQDIEKAVGNPPEKIAIEFTREAAANPQRTQSRLRTLEKLYESAEEVVDAGLTAELAEFKENKHVLSDKYYLYFTQLGRDVYTGDTISLDKLNDYDVDHILPQSFIKDDSLDNRVLTIRAVNNGKSDNVPAKMFGKKMGSFWRHLLDNGMISKRKYNNLITDPDNISKYAQKGFINRQLVETSQVIKLTANILNGIYDKDTEIIEVPAKMNSQMRKMFDLVKVREVNDYHHAFDAYLTIFIGNYLYKCYPKLRPYFVYDNFKKFGNKEDIGHKRFNFLGKIEREKKVVAPETGEILWSNVAPNETIKQIKKVYNYKFMIVSREITTRRAELFNQTVYPKNYRGKLIPIKEDRPTDLYGGYSGNTDAYLAIVALEDKKKGKYFKVVGIPTRAAAKLEKLKQQDSQQYLQALHEVIAPQFTKSTKKGIKKTEFEIVLDKVHYRQLVQDGPVKMMLGSSTYKYNAKQLVLSEKAL

SEQ ID NO: 126 - protein, 1398 aa, Veillonella parvula
METQASNQLISSHLKGYPIKDYFVGLDIGTSSVGWAVTNKAYELLKFRSHKMWGSRLFDEGESAVARRGFRSMRRRLERRKLRLKLLEELFADAMAQVDPTFFMRLRESKYHYEDKTTGHSSKHILFIDKNYNDQDYFKEYPTVYHLRSELMKSGTDDIRKLFLAVHHILKYRGNFLYEGATFDSNASTLDDVIKQALENITFNCFDCNSAISSIGQILMEAGKTKSDKAKAIEHLVDTYIATDTVDTSSKTQKDQVKEDKKRLKAFANLVLGLNASLIDLFGSVEELEEDLKKLQITGDTYDDKRDELAKAWSDEIYIIDDCKSVYDAIILLSIKEPGLTISESKVKAFNKHKDDLAILKSLLKSDRSIYNTMFKVDEKGLHNYVHYIKQGRTEETSCNREDFYKYTKKIVEGLSDSKDKEYILSQIELQILLPLQRIKDNGVIPYQLHLEELKAILAKCGPKFPFLNEVADGFSVAEKLIKMLEFRIPYYVGPLNTHHNVDNGGFAWAVRKASGRVTPWNFDDKIDREKSAAAFIKNLTNKCTYLLGEDVLPKSSLLYSEFMLLNELNNVRIDGKPLEKVVKEHLIEAVFKQDHKKMTKNRIEQFLKDNGYISETHKHEITGLDGEIKNDLASYRDMVRILGDGFDRSMAEEIITDITIFGESKKMLRETLRKKFASCLDDEAIKKLTKLRYRDWGRLSQKLLNGIEGCDKAGDGTPETIIILMRNFSYNLMELLGDKFSFMERIQEINAKLTEGQIVNPHDIIDDLALSPAVKRAVWQALRIVDEVAHIKKALPARIFVEVTRSNKNEKKKKDSRQKRLSDLYAAIKKDDVLLNGLNNEIFGELKSSLAKYDDAALRSKKLYLYYTQMGRCAYTGEIIELSLLNTDNYDIDHIYPRSLTKDDSFDNLVLCKRTANAQKSDAYPISEEIQKTQKPFWTFLKQQGLISERKYERLTRITPLTADDLSGFIARQLVETNQSVKAATTLLRRLYPGVDVVFVKAENVTDFRHDNNFIKVRSLNHHHHAKDAYLNIVVGNVYHERFTRNFRAFFKKNGANRTYNLAKMFNYDVNCTNAKDGKAWDVKTSMDTVKKMMDSNDVRVTKRLLEQTGALADATIYKATVAGKAKDGAYIGMKTKSSVFADVSKYGGMTKIKNAYSIIVQYTGKKGEVIKEIVPLPIYLTNRNTTDQDLINYVASIIPQAKDISIIYGKLCINQLVKVNGFYYYLGGKTNSKFCIDNAIQVIVSNEWIPYLKVLEKFNNMRKDNKDLKANVVSTRALDNKHTIEVRIVEEKNIEFFDYLVSKLKMPIYQKMKGNKAAELSEKGYGLFKKMSLEEQSIHLIELLNLLTNQKTTFEVKPLGITASRSTVGSKISNQDEFKVINESITGLYSNEVTIV

SEQ ID NO: 127 - protein, 1485 aa, Prevotella bivia
MKNILGLDLGTNSIGWAKISIDDNGKYIKDSIKLGSRIIPMSQDVLSNFSKGVTLSQTSERTSFRGARRLRERTLLRRERLHRILHLLGFLPKHYEKAIGWDRNDNKTYGKFINHAEPKLAWCKDNNGKMRFLFMDSFHDMLSEFSEKHPELLANGKKIPLDWTIYYLRKKALYKAITKEELAWILLNFNQKRGYYQLRGEEDRDSEANKKEYLELKVIGVEATGEKKGNDIWYNIHLENGWIYRRSSKNPLNDWLGKVKSFIVTTDLDADGNPKKDKDGNIKRSFRAPSEGDWTLIKKRTESLLENSGQTVGQFIYNHILEEPSAKIRGNFIRTIERKYYKDELKAILEKQKEFHHELSSESLLTECAKELYKRNIAHQEVLLKKGIIHLLLNDILFYQRPLKIKKSLIDNCPYENYKYVDKKSGDIKVKSIKCIAKSNPFFQEFRLWQFVSNLRLYRKSDDKDVTSEHLVTTDDYANLFTYLNNRKDIKQSVLLKEYFKIKKVKTINGAEYPVRWNYIDDDNKTYPCNETRYDILHALSKTELKSEWLTPERTYRLWHLLYSIESKEETKKALNKLNLSDDFTEAFLTIKPFKKEYGSYSEKAIKKLLSLMRMGYLWSEDEAIKQVGAEIEKTIEGELPDYVLQRLEKSQHNYNKISDFSGLPLWLASYIIYGRHSEAKEIIHWDNPESMMAYIKDFRQHSMRNPIVEQCVLETLRTVHDIWKEIGHIDEIHIELGREMKSTSEQRKAITQNVLHNQNTNIRIKLLLQELKNDNNITGVRPYSPMQQEILRIYEEGALQGLTKEDKDYNDILKISQTAQPTSNELTRYKLWLEQKYRSPYTGKAISLSKLFTSAYQIEHVIPQSRYFDDSLSNKVICESEVNTLKKAMLGMEFIKTCGGQKVHCTLLGDVEIYNEEDYKAFVNEHYSNNRTKRNKLLMEDIPQEFINRQLNDSRYISKMVKQLLSAIVRGQEEVEATSKFVIPCTGGITDRLKKDWGLNDIWNNLVSPRFQRMNALTGSEYFGHWENKEGKRVFQTTMPIQLQQGFSKKRIDHRHHAMDALVIACASRNIISYLNNETAQDTERRRDLRQKLCDKGGSVRKPWDSFTQDTQYALKDIIVTFKNYVRIINKATNYYEHYKTDGKKGMISQKGDELWAIRKPMHKETVFGKVNLRRPKRVSLSKAIDSVDIICNRKLKKYIKARLNEGLQKKQILNIFKELNNVWEGIDVNKIDIWEMSNDKEPMVATRKQLDTSFDEKKIRSISDTGIQKILLNYLITKNNNPELAFTPEGIQEMNSNISEYNDHKKHQPIYKVRVTEPLGAKYPIGTMGNNPKKFVEAQAGTNLYFAIYEDKEGKRNYDTIPLNIAAERLNQQLSPVPETNENNTPLKFYLSPNDLVYVPSEEERHSGNNIQLDKNRIYKMVSSTSKRCFFIHHRVAISLVDKKEFSAQNKMERSIDNEQVMIKSVCWKLITDRLGNIIKVIK

SEQ ID NO: 128 - protein, 1218 aa, Prevotella buccalis
MNKRILGLDTGTNSLGWAVVDWDEHAQSYELIKYGDVIFQEGVKIEKGIESSKAAERSGYKAIRKQYFRRRLRKIQVLKVLVKYHLCPYLSDDDLRQWHLQKQYPKSDELMLWQRTSDEEGKNPYYDRHRCLHEKLDLTVEADRYTLGRALYHLTQRRGFLSNRLDTSADNKEDGVVKSGISQLSTEMEEAGCEYLGDYFYKLYHEQGNKVRIRQRYTDRKKHYQHEFDAICEKQELSSELIEDLQRAIFFQLPLKSQRHGVGRCTFERGKPRCADSHPDYEEFRMLCFVNNIQVKGPHDLELRPLTYEEREKIEHLFFRKSKPNFDFEDIAKELAGKKNYAWIHDKEERAYKFNYRMTQGVPGCPTTAQLKSIFGDDWKTGIAETYTLIQKKNGSKSLQEMVDDVWNVLYSFSSVEKLKEFAHHKLQLDEENAEKFAKIKLSHSFAALSLKAIRKFLPFLRKGMYYTHASFFANIPTIVGKEIWNNEQSRKYIMENVGELVFNYQPKHRDVQGTIEMLIKDFLANNFELPAGATDKLYHPSMIETYPHALRNEFGILQLGSPRTNAIRNPMAMRSLHVLRRVVNQLLKESIIDENTEVHVEYARELNDANKRRAIADRQKEQDKQHKKYGDEIRKLYKEETGKDIEPTQTDVLKFQLWEEQNHYCLYTGEQIGITDFIGSNPKFDIEHTIPQSVGGDSTQMNLTLCDNRFNREVKKAKLPTELANHEEILTRIEPWKNKYEQLVKERDKQRTFAGMDKAVKDIRIQKRHKLQMEIDYWRGKYERFTMTEVPEGFSRRQGTGIGLISRYAGLYLKSLFHQADSRNKSNVYVVKGVATAEFRKMWGLQSEYEKKCRDNHSHHCMDAITIACIGKREYDLMAEYYHMEETFRQGRGSKPKFSKPWATFTEDVLNIYKNLLVVHDTPNNMPKHTKKYVQTSKGKVLAQGDTARGSLHLDTYYGAIERDGEIRYVVRRPLSSFTNPKELENIVDETVKRTIKEAIADKNFKQAIAEPIYMNEDKGILIKKVRCFANSVKQPINIRQHRDLSKKEYKQQYHVMNENNYLLAIYEGLVKNKVVREFEIVSYIEAAKYYKRSQDRNIFSSIVPTHSTKYGLPLKTKLLMGQQVLMFEENPDEIQVDNTKDLVKRLYKVVGIEKDGRIKFKHHQEARKEGLTIYSTPYKNNDDYVPIFRQSIKNINILVDGIDFNIDILGKVTLKE

SEQ ID NO: 129 - protein, 1218 aa, Prevotella timonensis
MNKRILGLDTGTNSLGWAVVDWDEHAQSYELIKYGDVIFQEGVKIEKGIESSKAAERSGYKAIRKQYFRRRLRKIQVLKVLVKYHLCPYLSDDDLRQWHLQKQYPKSDELMLWQRTSDEEGKNPYYDRHRCLHEKLDLTVEADRYTLGRALYHLTQRRGFLSNRLDTSADNKEDGVVKSGISQLSTEMEEAGCEYLGDYFYKLYDAQGNKVRIRQRYTDRNKHYQHEFDAICEKQELSSELIEDLQRAIFFQLPLKSQRHGVGRCTFERGKPRCADSHPDYEEFRMLCFVNNIQVKGPHDLELRPLTYEEREKIEPLFFRKSKPNFDFEDIAKALAGKKNYAWIHDKEERAYKFNYRMTQGVPGCPTIAQLKSIFGDDWKTGIAETYTLIQKKNGSKSLQEMVDDVWNVLYSFSSVEKLKEFAHHKLQLDEESAEKFAKIKLSHSFAALSLKAIRKFLPFLRKGMYYTHASFFANIPTIVGKEIWNKEQNRKYIMENVGELVFNYQPKHREVQGTIEMLIKDFLANNFELPAGATDKLYHPSMIETYPNAQRNEFGILQLGSPRTNAIRNPMAMRSLHILRRVVNQLLKESIIDENTEVHVEYARELNDANKRRAIADRQKEQDKQHKKYGDEIRKLYKEETGKDIEPTQTDVLKFQLWEEQNHHCLYTGEQIGITDFIGSNPKFDIEHTIPQSVGGDSTQMNLTLCDNRFNREVKKAKLPTELANHEEILTRIEPWKNKYEQLVKERDKQRTFAGMDKAVKDIRIQKRHKLQMEIDYWRGKYERFTMTEVPEGFSRRQGTGIGLISRYAGLYLKSLFHQADSRNKSNVYVVKGVATAEFRKMWGLQSEYEKKCRDNHSHHCMDAITIACIGKREYDLMAEYYRMEETFKQGRGSKPKFSKPWATFTEDVLNIYKNLLVVHDTPNNMPKHTKKYVQTSIGKVLAQGDTARGSLHLDTYYGAIERDGEIRYVVRRPLSSFTKPEELENIVDETVKRTIKEAIADKNFKQAIAEPIYMNEEKGILIKKVRCFAKSVKQPINIRQHRDLSKKEYKQQYHVMNENNYLLAIYEGLVKNKVVREFEIVSYIEAAKYYKRSQDRNIFSSIVPTHSTKYGLPLKTKLLMGQLVLMFEENPDEIQVDNTKDLVKRLYKVVGIEKDGRIKFKYHQEARKEGLPIFSTPYKNNDDYAPIFRQSINNINILVDGIDFTIDILGKVTLKE

SEQ ID NO: 130 - protein, 1487 aa, Prevotella timonensis
MKNILGLDLGSNSVGWALVKVEENGNPIGSIKMGSRIIPMSQDILGSFEKGDTVSQTAQRTLYRGKRRLIERHVLRRERLCRVLHIMNFLPAHFDRLLGWDKTDNKTYGKFIDDSEPKLAWRQNKNEMGKMEFVFMDSFHEMLSDFAKHQPQLIANGKKVPLDWTIYYLRKKALTQLISKEELAWILLNFNKKRGYYQLRGEEEEEQPTKKEEYKVLKVISVDADEGQKGNGIWYNIHLEDGGIYKKKSDIPLYDWVGKTLQLIVVTTYEKDGKTPKIFDSGKQNPSYRLPKEDDWGLVKKRTESQLQSSGKTVGAFIYDNILSKPDDKIRGNLVRTIERKYYKKELIEILQQQAKYHDELHNQNLLESCAKELYAHNDVHYNEVIKSNMINLLVNDIIFYQRPLKSKKSLIANCKYESYEYVDKETGEIKEMPIKCIAKSNPYYQEFRLWQFIHNLRLSDVVTREDVTAQYLSTPQDYCNLFTYLNDRKEIKQDILLKDFFKIKKVQIDKEKVFPIEWNYIKDATKSYPCNETRYELLSALKRAGMDKQWLDDTPNMQYRLWHLLYSVEEKEESAKALRKLYDDDKFVTSFLKIKPFNKCYGAYSEKAIKRLLTLMRMGKAWNEQAIDAKTLKCIQQIITDNVDSKLKEKIDDSRYVLHHVSDFQGLPTYLASYVIYGRHSEVTDIQCWDSPEDLLKFIRDFKQHSLRNPIVEQVILETLRVVYDIWKAEKHIDEIHVEVAREMKLTAQQRNEANLRNLNNEATNLRIKYLLEELKNDTFIKDVRPLSPIHQEKMRIYEQAVLGNLNKQDKDYDDIIKISKKEHPTNAELIRYKLWLEQRYCSPYTGKAISLSKLFTTAYEIEHIIPQSRYFDNSFNNKVICEAEVNKAKGNMLGYEFIKKQGGQKIYCTQLGKAVTILKEEAYKQFVNEHYAHNKRKRDNLLAENIPESFSSRQLNDTRYITKTIMSLLSNVVRQQSEEEATAKNLLPSSGSVTDRLKNDWGLKDVWNTIVTPRFERLNKLSGTNDFGEMKEENGNRYFQTNVPLEYEKGFKKKRIDHRHHAMDALVIACTTRNMVNYISNANANSPKQREDLRQLLCDKNRIINKPWDTFTQDALKALNDIVVSFKNNVRIINRATNRYQRYDKNGKKIIFSQKGDDMWAIRKSMHKETVFGRVNLIRKEVLPIAKALDNISAICNAQLRAYVNDLVDKHFNKKQLVAHFKSLNYKWNRQDVSKVEVWISSDNKTPMVAVRKPLDTSFDKKKIASITDTGIQTILLNYLESKGGDASVAFAPEGIQEMNSNIELYNNGKAHKPIKNVRLSEPLGAKYQVGERGAKTKKYVEADKGTNLFFAIYEDEEGKRYYYSVPLREAIERQKQKLSPVPEYNEKGVALKFYLSPNDLVYVPTEEERTMGTCHIDKARIYKMVSSTGCSCYFVPSTFAKVIVDKVELQSLNKMEKAITDECIKEVCWKLKVDRLGNIINVIK

SEQ ID NO: 131 - protein, 1138 aa, Bifidobacterium dentium
MLCRCHRRYRIGIDVGLMSVGLAAIEVDETGFPIRILNIQSVIHDGGIDPQLGKKKSISRKAISGVARRTRRMRRRKVVRLRQLDATLESLGFPIVEPDSLDTWEIWLTRAKLASSYIQDDETRKEDVSIALRHIARHRGWRNPYSNVESLFVDVAPSEQYEELRRKAEEKLGTSLSGNPTSAEIVECILKRQVGEVQLRTRSRKGVNGNAVEKEGLLPTKLMQSDNAAEIRRIFKVQRIDDETGRKLLRAVFKACSPKGSVERRVGRDALAPGLPRALKASLAFQEYRIANVLTNLVISEDGTKRKLTIAEKQRVFGFLSSNETDDITWIDVAEKLGLERRQIQGVGCLTADGEERISSTPPRNITALHIHSAKPVIREKLVAWWKAASPTVRETMVELLSNTVDIDRVREDMDYSSAVAFIDSLGDEELTALDSVDLLSGRAAYSRQTLKQLTERMLNTDDDLHEARKAVFGVDDNWKPPVDAISTSVGNPAVDRVLKIVNRYLLACQKRWRNPQSVQIEHVRESFSSVAKAKETERVQGERARYRNDLRRELCEQEGLNKIRESDIRRWESVQRQNGTCLYCGSPITFRTCEMDHIVPRKGVGSTNTRVNLAAACAACNKLKSNTAFSVWARTEGAANRKVSQRDAIERVKTFIFNKSVPPREQRAFKQAVISRLRQAESDPAIDNRSIESVAWMADELHRRIEAYFNQDADVSGNTPATQVWVFQGRVTALARKASGIEGRIHFAGEWKKTRLDRRHHAVDAAVIAMMNHSAAQTLVERDSLRLSQWITRKPETWKNYPFSEGQKKTRFKEWLDCMNALLDLLNDALDSDRVPVTRCQRMSLGNSQAHAATIRKMKRVELFSPMDADLIRRASTPALYCALTRLPEYSPEKGLPENRGREIVLNGRHIRSTETVDFFASGAAQLMVRNGSAEIGDSIHHMRIYRYRKTGAKSQEYVYGMIRVFQIDLLHASSENLFAVQLPSQSVSVRYGDKNVVQAIQEGRAEYLGHIVPNDEILISYEGVRMKDSEKIGAYANDFSGTASELAQRRHWVVVGSDVSKLALRPSYLSEEGLENSGSESERLSKQTRKVIEGKGWVVAVNILAKYHPVVIRRNALGEPRFRTNSGMPVSWRWDR

SEQ ID NO: 132 - protein, 587 aa, Neisseria subflava
MATSRSRIRSQTDAFGVVGSLVAFNQTSRLFVAKKNEGETADKELGALLKGVADNAHALQTGNFRTPAELALNKFEKESGHIRNQRGDYSHTFNRKDLQAELNLLFEKQKEFGNPHVSDGLKEGIETLLMAQRPALSGDAVQKMLGYCTFEPTEPKAAKNTYTAGRFIWLTKLNNLRILEQGSERPLTTTERATLMDEPYRKSKLTYAQARKLLGLEDTAFFKGLRYGKDNAEASTLMEMKAYHAISRALEKEGLKDKKSPLNLSPELQDEIGTAFSLFKTDEDITGRLKDRVQPEILEALLKHISFDKFVQISLKALRRIVPLMEQGKRYDEACAEIYGDHYGKKNAEEKIYLPPIPADEIRNPVVLRALSQARKVINAVVRRYGSPARIHIETAREVGKSFKDRKEIEKRQEENRKDREKAAAKFREYFPNFVGEPKSKDILKLRLYEQQHGKCLYSGKEINLGRLNEKGYIEIDHALPFSRTWDDSFNNKVLVLGSENQNKGNQTPYEYFNGKDNSREWQEFKARVETSRFPRSKKQRILLQKFDEDGIYRIGVKTALSFPKYQIDELGKEIRPCRLKKRPPVR

SEQ ID NO: 133 - protein, 1269 aa, Mycoplasma gallisepticum
MNNSIKSKPEVTIGLDLGVGSVGWAIVDNETNIIHHLGSRLFSQAKTAEDRRSFRGVRRLIRRRKYKLKRFVNLIWKYNSYFGFKNKEDILNNYQEQQKLHNTVLNLKSEALNAKIDPKALSWILHDYLKNRGHFYEDNRDFNVYPTKELAKYFDKYGYYKGIIDSKEDNDNKLEEELTKYKFSNKHWLEEVKKVLSNQTGLPEKFKEEYESLFSYVRNYSEGPGSINSVSPYGIYHLDEKEGKVVQKYNNIWDKTIGKCNIFPDEYRAPKNSPIAMIFNEINELSTIRSYSIYLTGWFINQEFKKAYLNKLLDLLIKTNGEKPIDARQFKKLREETIAESIGKETLKDVENEEKLEKEDHKWKLKGLKLNTNGKIQYNDLSSLAKFVHKLKQHLKLDFLLEDQYATLDKINFLQSLFVYLGKHLRYSNRVDSANLKEFSDSNKLFERILQKQKDGLFKLFEQTDKDDEKILAQTHSLSTKAMLLAITRMTNLDNDEDNQKNNDKGWNFEAIKNFDQKFIDITKKNNNLSLKQNKRYLDDRFINDAILSPGVKRILREATKVFNAILKQFSEEYDVTKVVIELARELSEEKELENTKNYKKLIKKNGDKISEGLKALGISEDEIKDILKSPTKSYKFLLWLQQDHIDPYSLKEIAFDDIFTKTEKFEIDHIIPYSISFDDSSSNKLLVLAESNQAKSNQTPYEFISSGNAGIKWEDYEAYCRKFKDGDSSLLDSTQRSKKFAKMMKTDTSSKYDIGFLARNLNDTRYATIVFRDALEDYANNHLVEDKPMFKVVCINGSVTSFLRKNFDDSSYAKKDRDKNIHHAVDASIISIFSNETKTLFNQLTQFADYKLFKNTDGSWKKIDPKTGVVTEVTDENWKQIRVRNQVSEIAKVIEKYIQDSNIERKARYSRKIENKTNISLFNDTVYSAKKVGYEDQIKRKNLKTLDIHESAKENKNSKVKRQFVYRKLVNVSLLNNDKLADLFAEKEDILMYRANPWVINLAEQIFNEYTENKKIKSQNVFEKYMLDLTKEFPEKFSEFLVKSMLRNKTAIIYDDKKNIVHRIKRLKMLSSELKENKLSNVIIRSKNQSGTKLSYQDTINSLALMIMRSIDPTAKKQYIRVPLNTLNLHLGDHDFDLHNMDAYLKKPKFVKYLKANEIGDEYKPWRVLTSGTLLIHKKDKKLMYISSFQNLNDVIEIKNLIETEYKENDDSDSKKKKKANRFLMTLSTILNDYILLDAKDNFDILGLSKNRIDEILNSKLGLDKIVK

SEQ ID NO: 134 - protein, 1354 aa, Prevotella melaninogenica
MADFAKYQPGMVADGRKIPLDWTLYYLRKKALTQAIRKEELAWILLNFNQKRGYYQLRGEEEEENSTKHEEYYELKVVSVEAAEEGKGGNTWYNVTLENGWIYRRQSKIELNDWVGKVRPFIVTTEYEIDGVTIKKDKNGEVKRSFRAPSENDWGLRKKRTESLLEESGKTVGAFIYNHILSEPADKIRGNFIRTIERKFYKKELEAILREQSKHQKELKDIDTLIACIKELYPNNKPHQDSLIKKDMTYLLITDLIFYQRPLKSKKSLIADCPYEYYEYVIKETGENKRQSIKCIAKSNPYYQEFRLWQFIINLRLFDRNNDKEVTSEYLSSMEDYTRLFTYLNDRKDINQETLLKDFFKQKKVKRGMEKEFPIRWNYIEDKEKKYPCNETRHELLTALGKVGIDHSWLDDKELFYRLWHLLYSVESKEEAEGALRKLVDNDDFVNAFLKIKPFKKEYGAYSEKAIKKLLAVMRMGNLWNEVDICEQTRDRIQNIIKGDIDEKIKDRMGRTFSQLSDFQGLPEWLACYVVYGQHSEATDIQRWTKPENLMAYINGFKQHSLRNPIVEQCILETLRTVHDIWKEAGHIDEIHIELGRGMKSTADQRARMSKSIMQNENTNLRIKSLLMELKNAKEFENVRPYSPMQQEILRIYEEGALQELTKEDAQYNEISKISQMAQPSANELLKYRLWLEQKYCSPYTGKPISLSKLFTSAYQIEHIIPQSRYFDDSFTNKVICEAEVNQLKSNMLGYEFIKKHGGEIVRCTMIGDVKLLDAKEYYNFVTEHYTNNRRKKEKLLMEDIPQEFLNRQMNDSRYISKKVMAILSNIVREEDEQEAKSKFVIACSGGITDRLKQDWGLNDVWNSIVYPRFERLNKLTNTENFGRWENKKGKQVFQTSVPLELQKDFSKKRIDHRHHAMDALVIACASNNIINYLNNESAKSQEKREDLRKKLCDKNRIIRKPWETFTQDAHTALENVVVSFKNYIRVINKATNYYEKYDKNGKKEIAEQKGQDMWAIRKPMHKETVFGQVNLRRKITIKLKDALEKIPAICDKELRDYINILVAKQFNKKQILAHFKSINYRLNMKSVDKVDVWQFSNEKEPMVATRKSVDTSFDTKRIATITDTGIQKILLNYLKAKNNDPNIAFTPEGIAEMNKHITEYNNGKQHQPILKVRVSEPKGAKYQVGETGNKRSKFVEAQKGTNLYFAIYEDKEGNRSYNTIPLNEVIERLKQGLSPVPDANEKSIPLKFHLSPNDLVYVPKTDEENEIKMGQIYKFVDSSGTTANFVPHRVSNLIYNVDKKIAENFCNHEIIQNEYGIGSPQSKNQKSITGEMIKAVCWKLEVDRLGNIHKIIK

SEQ ID NO: 135 - protein, 1130 aa, Streptococcus gallolyticus
MTNGKILGLDIGIASVGVGIIEAKTGKVVHANSRLFSAANAENNAERRGFRGSRRLNRRKKHRVKRVRDLFEKYEIVTDFRNLNLNPYELRVKGLTEQLTNEELFAALRTISKRRGISYLDDAEDDSTGSTDYAKSIDENRRLLKTKTPGQIQLERLEKYGQLRGNFTVYDENGEAHRLINVFSTSDYEKEARKILETQADYNKKITAEFIDDYVEILTQKRKYYHGPGNEKSRTDYGRFRTDGTTLENIFGILIGKCSFYPDEYRASKASYTAQEYNFLNDLNNLKVPTETGKLSTEQKEALVEFAKSTATLGPAKLLKEIAKILDCKVDEIKGYREDDKGKPDLHTFEPYRKLKFNLDSVNIDDLSREVLDKLADILTLNTEREGIEDAIRHNLPNQFTEGQISEIIKVRKSQSTAFNKGWHSFSAKLMNELIPELYATSDEQMTILTRLEKFKVNKKSSKNTKTIDEKEVTDEIYNPVVAKSVRQTIKIINAAVKKYGDFDKIVIEMPRDKNADDEKKFIDKRNKENKKEKDDALKRAAYLYNGTDKLPDEVFHGNKQLETKIRLWYQQGERCLYSGKPIPIQELVHNSNNFEIDHILPLSLSFDDSLANKVLVYAWTNQEKGQKTPYQVIDSMDAAWSFREMKDYVLKQKGLGKKKRDYLLTTENIDKIEVKKKFIERNLVDTRYASRVVLNSLQSALRELGKDTKISVIRGQFTSQLRRKWKIDKSRETYHHHAVDALIIAASSQLKLWEKQDNPMFVDYGNNQVVDKQTGEILSVSDDEYKELVFQPPYQGFVNMISSKGFEDEILFSYQVDSKYNRKVSDATIYSTRKAKIGKDKKEETYVLGKIKDIYSQNGFDTFIKKYNKDKTQFLMYQKDPLTWENVIEVILRDYPTTKKSEDGKNDVKCNPFEEYRRENGLVCKYSKKGKGTPIKSLKYYDKKLGNCIDITPEGSKNEVVLQSLNPWRADVYFNPETLKYELLGLKYSDLSFEKGTGKYHISQEKYDVIKEKEGIGKKSEFKFTLYRNDLILIKDTASGEQEIYRFLSRTMPNVKHYAELKPYDKEKFDNVQELVEALGEADKVGRCIKGLNKSNLSIYKVRTDVLGNKYFVKKEGDKPKLDFKNNKK

SEQ ID NO: 136 - protein, 1371 aa, Streptococcus gallolyticus
MTEKNYSIGLDIGTNSVGWAVITDDYKVPAKKMKVLGNTDKKYIKKNLLGALLFDNGETAEATRLKRTARRRYTRRKNRLRYLQEIFAEEMAKVDESFFYRLDESFLTTDDKDFERHPIFGNKADEIKYHQEFPTIYHLRKHLADSHEKADLRLIYLALAHMIKFRGHFLIEGELNAENTDVQKLFEAFVEVYDRTFDDSNLSEITVDASSILTEKFSKSRRLENLIKHYPTEKKNTLFGNLVALALGLQPNFKTSFKLSEDAKLQFSKDTYEEDLEELIGKIGDEYADLFTSAKNLYDAILLSGILTVADNTTKAPLSASMIKRYNEHQVDLKKLKEFIKNNASDKYDEIFNDKDKNGYAGYIENGVKQDEFYKYLKTTLSKIDGSDYFLDKIEREDFLRKQRTFDNGSIPHQIHLQEMHAILRRQGEHYAFLKENQAKIEKILTFRIPYYVGPLARKNSRFAWAEYHSDEKITPWNFDEIIDKEKSAEKFITRMTLNDLYLPEEKVLPKHSLVYETYTVYNELTKVKYVNEQGKSNFFDANMKQEIFEHVFKENRKVTKDKFLNYLNKEFPEYRIQDLIGLDKENKSFNASLGTYHDLKKILDKSFLDDKTNETIIEDIIQTLTLFEDRDMIRQRLQKYSDIFTPQQLKKLERRHYTGWGRLSYKLINGIRNKENGKSILDYLIDDGYANRNFMQLISDDTLPFKQIIKDAQIIGDIDDVTSVVRELPGSPAIKKGILQSVKIVDELVKVMGHNPDNIVIEMARENQTTNRGRNQSQQRLKKLQDSLKELGSNILNEEKPSYIEGKVENNHLQDDRLFLYYIQNGKDMYTGDELDIDHLSDYDIDHIIPQAFIKDDSIDNRVLTSSAKNRGKSDDVPSLDIVHDRKADWIRLYKSGLISKRKFDNLTKAERGGLTENDKAGFIKRQLVETRQITKHVAQILDSRFNTERDENDKVIRNVKVITLKSNLVSQFRKDFKFYKVREINDYHHAHDAYLNAVVGTALLKKYPKLAPEFVYGEYKKYDIRKFITSSGDKATAKYFFYSNLMNFFKRVIRYSNGKVVVRPVIECSKDTGEIAWNKQTDFEKVRRVLSYPQVNIVKKVETQTGGFSKESILPKGNSDKLIPRKTKKFRWDTPKYGGFDSPNIAYSVFVIADVEKGKAKKLKTVKELVGISIMERSSFEENPVVFLEKKGYQNVQEDNLIKLPKYSLFEFEGGRRRLLASASELQKGNEVVLSRHLVELLYHAHRVNSFNNSEHLKYVSEHKKEFGEVLSCVENFAKSYVDVEKNLGKIRAVADKIDTFSIEDISISFVNLLTLTALGAPADFNFLGEKIPRKRYTSTKECLNATLIHQSITGLYETRIDLSKLGEE

SEQ ID NO: 137 - protein, 1168 aa, Azospirillum sp.
MARPAFRAPRREHVNGWTPDPHRISKPFFILVSWHLLSRVVIDSSSGCFPGTSRDHTDKFAEWECAVQPYRLSFDLGTNSIGWGLLNLDRQGKPREIRALGSRIFSDGRDPQDKASLAVARRLARQMRRRRDRYLTRRTRLMGALVRFGLMPADPAARKRLEVAVDPYLARERATRERLEPFEIGRALFHLNQRRGYKPVRTATKPDEEAGKVKEAVERLEAAIAAAGAPTLGAWFAWRKTRGETLRARLAGKGKEAAYPFYPARRMLEAEFDTLWAEQARHHPDLLTAEAREILRHRIFHQRPLKPPPVGRCTLYPDDGRAPRALPSAQRLRLFQELASLRVIHLDLSERPLTPAERDRIVAFVQGRPPKAGRKPGKVQKSVPFEKLRGLLELPPGTGFSLESDKRPELLGDETGARIAPAFGPGWTALPLEEQDALVELLLTEAEPERAIAALTARWALDEATAAKLAGATLPDFHGRYGRRAVAELLPVLERETRGDPDGRVRPIRLDEAVKLLRGGKDHSDFSREGALLDALPYYGAVLERHVAFGTGNPADPEEKRVGRVANPTVHIALNQLRHLVNAILARHGRPEEIVIELARDLKRSAEDRRREDKRQADNQKRNEERKRLILSLGERPTPRNLLKLRLWEEQGPVENRRCPYSGETISMRMLLSEQVDIDHILPFSVSLDDSAANKVVCLREANRIKRNRSPWEAFGHDSERWAGILARAEALPKNKRWRFAPDALEKLEGEGGLRARHLNDTRHLSRLAVEYLRCVCPKVRVSPGRLTALLRRRWGIDAILAEADGPPPEVPAETLDPSPAEKNRADHRHHALDAVVIGCIDRSMVQRVQLAAASAEREAAAREDNIRRVLEGFKEEPWDGFRAELERRARTIVVSHRPEHGIGGALHKETAYGPVDPPEEGFNLVVRKPIDGLSKDEINSVRDPRLRRALIDRLAIRRRDANDPATALAKAAEDLAAQPASRGIRRVRVLKKESNPIRVEHGGNPSGPRSGGPFHKLLLAGEVHHVDVALRADGRRWVGHWVTLFEAHGGRGADGAAAPPRLGDGERFLMRLHKGDCLKLEHKGRVRVMQVVKLEPSSNSVVVVEPHQVKTDRSKHVKISCDQLRARGARRVTVDPLGRVRVHAPGARVGIGGDAGRTAMEPAEDIS

SEQ ID NO: 138 - protein, 1345 aa, Streptococcus mutans
MKKPYSIGLDIGTNSVGWAVVTDDYKVPAKKMKVLGNTDKSHIKKNLLGALLFDSGNTAADRRLKRTARRRYTRRRNRILYLQEIFAEEMSKVDDSFFHRLEDSFLVTEDKRGERHPIFGNLEEEVKYHENFPTIYHLRQYLADNPEKVDLRLVYLALAHIIKFRGHFLIEGKFDTRNNDVQRLFQEFLAVYDNTFENSSLQEQNVQVEEILTDKISKSAKKDRVLKLFPNEKSNGRFAEFLKLIVGNQADFKKHFELEEKAPLQFSKDTYEEELEVLLAQIGDNYAELFLSAKKLYDSILLSGILTVTDVSTKAPLSASMIQRYNEHQMDLAQLKQFIRQKLSDKYNEVFSDVSKDGYAGYIDGKTNQEAFYKYLKGLLNKIEGSGYFLDKIEREDFLRKQRTFDNGSIPHQIHLQEMRAIIRRQAEFYPFLADNQDRIEKILTFRIPYYVGPLARGKSDFAWLSRKSADKITPWNFDEIVDKESSAEAFINRMTNYDLYLPNQKVLPKHSLLYEKFTVYNELTKVKYKTEQGKTAFFDANMKQEIFDGVFKVYRKVTKDKLMDFLEKEFDEFRIVDLTGLDKENKAFNASYGTYHDLRKILDKDFLDNSKNEKILEDIVLTLTLFEDREMIRKRLENYSDLLTKEQVKKLERRHYTGWGRLSAELIHGIRNKESRKTILDYLIDDGNSNRNFMQLINDDALSFKEEIAKAQVIGETDNLNQVVSDIAGSPAIKKGILQSLKIVDELVKIMGHQPENIVVEMARENQFTNQGRRNSQQRLKGLTDSIKEFGSQILKEHPVKHSQLQNDRLFLYYLQNGRDMYTGEELDIDYLSQYDIDHIIPQAFIKDNSIDNRVLTSSKENRGKSDDVPSKNVVRKMKSYWSKLLSAKLITQRKFDNLTKAERGGLTDDDKAGFIKRQLVETRQITKHVARILDERFHTETDENNKKIRQVKIVTLKSNLVSNFRKEFELYKVREINDYHHAHDAYLNAVIGKALLGVYPQLEPEFVYGDYPHFHGHKENKATAKKFFYSNIMNFFKKDDVRTDKNGEIIWKKDEHISNIKKVLSYPQVNIVKKVEEQTGGFSKESILPKGNSDKLIPRKTKKFYWDTKKYGGFDSPIVAYSILVIADIEKGKSKKLKTVKALVGVTIMEKMTFERDPVAFLERKGYRNVQEENIIKLPKYSLFKLENGRKRLLASARELQKGNEIVLPNHLGTLLYHAKNIHKVDEPKHLDYVDKHKDEFKELLDVVSNFSKKYTLAEGNLEKIKELYAQNNGEDLKELASSFINLLTFTAIGAPATFKFFDKNIDRKRYTSTTEILNATLIHQSITGLYETRIDLSKLGGD

SEQ ID NO: 139 - protein, 1024 aa, Helicobacter mustelae
MIRTLGIDIGIASIGWAVIEGEYTDKGLENKEIVASGVRVFTKAENPKNKESLALPRTLARSARRRNARKKGRIQQVKHYLSKALGLDLECFVQGEKLATLFQTSKDFLSPWELRERALYRVLDKEELARVILHIAKRRGYDDITYGVEDNDSGKIKKAIAENSKRIKEEQCKTIGEMMYKLYFQKSLNVRNKKESYNRCVGRSELREELKTIFQIQQELKSPWVNEELIYKLLGNPDAQSKQEREGLIFYQRPLKGFGDKIGKCSHIKKGENSPYRACKHAPSAEEFVALTKSINFLKNLTNRHGLCFSQEDMCVYLGKILQEAQKNEKGLTYSKLKLLLDLPSDFEFLGLDYSGKNPEKAVFLSLPSTFKLNKITQDRKTQDKIANILGANKDWEAILKELESLQLSKEQIQTIKDAKLNFSKHINLSLEALYHLLPLMREGKRYDEGVEILQERGIFSKPQPKNRQLLPPLSELAKEESYFDIPNPVLRRALSEFRKVVNALLEKYGGFHYFHIELTRDVCKAKSARMQLEKINKKNKSENDAASQLLEVLGLPNTYNNRLKCKLWKQQEEYCLYSGEKITIDHLKDQRALQIDHAFPLSRSLDDSQSNKVLCLTSSNQEKSNKTPYEWLGSDEKKWDMYVGRVYSSNFSPSKKRKLTQKNFKERNEEDFLARNLVDTGYIGRVTKEYIKHSLSFLPLPDGKKEHIRIISGSMTSTMRSFWGVQEKNRDHHLHHAQDAIIIACIEPSMIQKYTTYLKDKETHRLKSHQKAQILREGDHKLSLRWPMSNFKDKIQESIQNIIPSHHVSHKVTGELHQETVRTKEFYYQAFGGEEGVKKALKFGKIREINQGIVDNGAMVRVDIFKSKDKGKFYAVPIYTYDFAIGKLPNKAIVQGKKNGIIKDWLEMDENYEFCFSLFKNDCIKIQTKEMQEAVLAIYKSTNSAKATIELEHLSKYALKNEDEEKMFTDTDKEKNKTMTRESCGIQGLKVFQKVKLSVLGEVLEHKPRNRQNIALKTTPKHV

SEQ ID NO: 140 - protein, 765 aa, Butyrivibrio fibrisolvens
MGITIGLDLGVASVGWAVVNDDYEILESCSNIFPSADASKNSERRGFRQGRRLTRRRKNRIHDFQKLWEDKGFVIPSQGTEDVLAIKIKGLSEKLSVDEVYWVLLNSLKHRGISYLDDADSGDNSSDYAKSISRNEEELKEKLPCEIQWERLQKYGAYRGNISIVEDGEPITLRNVFTTSAYKKEVEQFIDTQAKYNAQYSGDFKADYLEIFNRKREYYEGPGNELSRTDYGKYTTEINADGEYITVDNIFDKLVGKCSVNPDERRAAGASYTAQEFNVLNDLNNLTISSESSFIEDGKLTEDAKRKIIETIKNAKTVNVKKIICDVIGDKKCQISGARIDKNEKEIFHSFEAYNKMRRALEEIGFDISSLSRENLDLIGDILTLNTDRESILNAFNRKGIELADEAKDILVKVRKTNGSLFNKWQSFGLSIMNELIPELYAQPKNQMELLTAMGVFKSRGDRFLECKEIPGDLIVDDIYNPVVSKTVRITVRILNALIKKYGYPDRVVIEMPRDKNSDEEQQRLKKEQRDNENEIKDIKARVKTEYGREITEEDFRQHSKLSLKLKLWNEQQGICPYSGKSIKIDDLLDNPNLFEVDHIIPLSISFDDSRNNKVLVYSSENQDKGNRTPLAYLASVNRQWDIHSFMDYVLKTYAGAQKRKKRDNLLNEQDITKVEVLQGFVNRNINDTRYASKVVLNSLQEYFSSKECSTKVKVIRGSFTHQMRVNLKLKKTVMNHMFIMQLMQCLLLFHRWDMTLIMNLQISI

SEQ ID NO: 141 - protein, 1338 aa, Coprococcus catus
MKQEYFLGLDMGTGSLGWAVTDSTYQVMRKHGKALWGTRLFESASTAEERRMFRTARRRLDRRNWRIQVLQEIFSEEISKVDPGFFLRMKESKYYPEDKRDAEGNCPELPYALFVDDNYTDKNYHKDYPTIYHLRKMLMETTEIPDIRLVYLVLHHMMKHRGHFLLSGDISQIKEFKSTFEQLIQNIQDEELEWHISLDDAAIQFVEHVLKDRNLTRSTKKSRLIKQLNAKSACEKAILNLLSGGTVKLSDIFNNKELDESERPKVSFADSGYDDYIGIVEAELAEQYYIIASAKAVYDWSVLVEILGNSVSISEAKIKVYQKHQADLKTLKKIVRQYMTKEDYKRVFVDTEEKLNNYSAYIGMTKKNGKKVDLKSKQCTQADFYDFLKKNVIKVIDHKEITQEIESEIEKENFLPKQVTKDNGVIPYQVHDYELKKILDNLGTRMPFIKENAEKIQQLFEFRIPYYVGPLNRVDDGKDGKFTWSVRKSDARIYPWNFTEVIDVEASAEKFIRRMTNKCTYLVGEDVLPKDSLVYSKFMVLNELNNLRLNGEKISVELKQRIYEELFCKYRKVTRKKLERYLVIEGIAKKGVEITGIDGDFKASLTAYHDFKERLTDVQLSQRAKEAIVLNVVLFGDDKKLLKQRLSKMYPNLTTGQLKGICSLSYQGWGRLSKTFLEEITVPAPGTGEVWNIMTALWQTNDNLMQLLSRNYGFTNEVEEFNTLKKETDLSYKTVDELYVSPAVKRQIWQTLKVVKEIQKVMGNAPKRVFVEMAREKQEGKRSDSRKKQLVELYRACKNEERDWITELNAQSDQQLRSDKLFLYYIQKGRCMYSGETIQLDELWDNTKYDIDHIYPQSKTMDDSLNNRVLVKKNYNAIKSDTYPLSLDIQKKMMSFWKMLQQQGFITKEKYVRLVRSDELSADELAGFIERQIVETRQSTKAVATILKEALPDTEIVYVKAGNVSNFRQTYELLKVREMNDLHHAKDAYLNIVVGNAYFVKFTKNAAWFIRNNPGRSYNLKRMFEFDIERSGEIAWKAGNKGSIVTVKKVMQKNNILVTRKAYEVKGGLFDQQIMKKGKGQVPIKGNDERLADIEKYGGYNKAAGTYFMLVKSLDKKGKEIRTIEFVPLYLKNQIEINHESAIQYLAQERGLNSPEILLSKIKIDTLFKVDGFKMWLSGRTGNQLIFKGANQLILSHQEAAILKGVVKYVNRKNENKDAKLSERDGMTEEKLLQLYDTFLDKLSNTVYSIRLSAQIKTLTEKRAKFIGLSNEDQCIVLNEILHMFQCQSGSANLKLIGGPGSAGILVMNNNITACKQISVINQSPTGIYEKEIDLIKL

SEQ ID NO: 142 - protein, 1035 aa, Candidatus Puniceispirillum
MRRLGLDLGTNSIGWCLLDLGDDGEPVSIFRTGARIFSDGRDPKSLGSLKATRREARLTRRRRDRFIQRQKNLINALVKYGLMPADEIQRQALAYKDPYPIRKKALDEAIDPYEMGRAIFHINQRRGFKSNRKSADNEAGVVKQSIADLEMKLGEAGARTIGEFLADRQATNDTVRARRLSGTNALYEFYPDRYMLEQEFDTLWAKQAAFNPSLYIEAARERLKEIVFFQRKLKPQEVGRCIFLSDEDRISKALPSFQRFRIYQELSNLAWIDHDGVAHRITASLALRDHLFDELEHKKKLTFKAMRAILRKQGVVDYPVGFNLESDNRDHLIGNLTSCIMRDAKKMIGSAWDRLDEEEQDSFILMLQDDQKGDDEVRSILTQQYGLSDDVAEDCLDVRLPDGHGSLSKKAIDRILPVLRDQGLIYYDAVKEAGLGEANLYDPYAALSDKLDYYGKALAGHVMGASGKFEDSDEKRYGTISNPTVHIALNQVRAVVNELIRLHGKPDEVVIEIGRDLPMGADGKRELERFQKEGRAKNERARDELKKLGHIDSRESRQKFQLWEQLAKEPVDRCCPFTGKMMSISDLFSDKVEIEHLLPFSLTLDDSMANKTVCFRQANRDKGNRAPFDAFGNSPAGYDWQEILGRSQNLPYAKRWRFLPDAMKRFEADGGFLERQLNDTRYISRYTTEYISTIIPKNKIWVVTGRLTSLLRGFWGLNSILRGHNTDDGTPAKKSRDDHRHHAIDAIVVGMTSRGLLQKVSKAARRSEDLDLTRLFEGRIDPWDGFRDEVKKHIDAIIVSHRPRKKSQGALHNDTAYGIVEHAENGASTVVHRVPITSLGKQSDIEKVRDPLIKSALLNETAGLSGKSFENAVQKWCADNSIKSLRIVETVSIIPITDKEGVAYKGYKGDGNAYMDIYQDPTSSKWKGEIVSRFDANQKGFIPSWQSQFPTARLIMRLRINDLLKLQDGEIEEIYRVQRLSGSKILMAPHTEANVDARDRDKNDTFKLTSKSPGKLQSASARKVHISPTGLIREG

SEQ ID NO: 143 - protein, 1270 aa, Mycoplasma gallisepticum
MNNSIKSKPEVTIGLDLGVGSVGWAIVDNETNIIHHLGSRLFSQAKTAEDRRSFRGVRRLIRRRKYKLKRFVNLIWKYNSYFGFKNKEDILNNYQEQQKLHNTVLNLKLEALNAKIDPKALSWILHDYLKNRGHFYEDNRDFNVYPTEELANYFDEFGYYKGIIDSKNDDDDKLEEGLTKYKFSNQHWLEEVKKVLSNQTGLPEKFKEEYESLFSYVRNYSEGPGSINSVSPYGIYHLDEKEGKVVQKYNNIWDKTIGKCSIFPDEYRAPKNSPIAMIFNEINELSTIRSYSIYLTGWFINQEFKKAYLNKLLDLLIKTNSEKPIDARQFKKLREETIAESIGKETLKDVESEEKLEKDDHKWKLKGLKLNTNGKIQYNDLSSLAKFVHKLKQHLKLDFLLEDQYTPLDKINFLQSLYVYLGKHLRYSNRVDSANLKEFSDSSRLFERVLQEQKDGLFKLFEQTDKDDEKILTQTHSLSTKAMLLAITRMTNLDNDEDNQKNNDKGWNFEAIKNFDQKFIDITKTNNNLSLKQDKRYLDDQFINDAILSPGVKRILREATKVFNAILKQFSEEYDVTKVVIELARELSEEKELENTKNYKKLIKKNGDKISEGLKALGIAEDKIEEILKSPTKSYKVLLWLQQDHIDPYSQKEIAFDDILTKTEKTEIDHIIPYSISFDDSSSNKLLVLAESNQAKSNQTPYEFINSGKAEITWEVYEAYCHKFKNGDSSLLDSTQRSKKFAKMMKTDTSSKYDIGFLARNLNDTRYATIVFRDALKDYANNHLVEDKPMFKVVCINGGVTSFLRKNFDPKSWYAKKDRDKNIHHAVDASIISIFSNETKTLFNQLTKFADYKLFKNTDGSWKKIDPKTGVVSEVTDENWKQIRVRNQVSEIAKVIDKYIQDSNIERKARYSRKIENKTNISLFNDTVYSAKKVGYEDQIKRKNLKTLDIHESAEENKNSKVKKQFVYRKLVNVSLLNNDKLADLFAEKEDILMYRANPWVINLAEQIFNEYTENKKIKSQNVFEKYMLDLTKEFPEKFSEAFVKSMIRNKTAIIYNVEKDVVHRIKRLKILSSELKENKWSNVIIRSKNESGTKLSYQDTINSIALMIMRSIDPTAKKQYIRVPLNTLNLHLGDQDFDLHNIDAYLKKPKFVKYLKANEIGDEYKPWRVLTSGTLLIHKKDKKLMYISSFQNLNDLIEIKNLIETEYKENVDSDPKKKKKASQILRSLSVILNDYILLDAKYNFDILGLSKNKIDEILNSKLDLDKIAK

SEQ ID NO: 144 - protein, 1204 aa, Prevotella ruminicola
MERILGIDTGTNSLGWAIVDKDENQYHLVAKGTNIFSEGVKIEKGIESSKAAERTEHRSVRKHYWRRKIRKIRLLTILSDNDLCPRLKHEQLRQWRLKKVYPTDDTFMEWQRTEDKAQVNPYKFRYICLTQKLDLSDITQRFILGRALYHLNQRRGFLSNRKEATKESEGTVKEGISSLSKDMKDSGCEYLGEYFYQLYQQGKKIRNHYTARKEHYLKEFKAICSKQELDDALIEKLEKAIFDQRPLKSQKGQVGTCTFEKGKSRCPSSHPLYEDFRMYSFINNIKVQVDTLYDKGERSLTDEEKQLIIPLFKRKSKRTFPFEDIAKKIAGKNNYCYIKSNEEKAYKFNYQMDTQVSGSPVNAQLEEIFGEDWLSSVCEVYTLANNKSRFQIMNDVWHVLFFYDDEDKLKEFAKDRLQLDDELAEKFSKISIPNDYAALSLKAIRKIMPYLRDYGLIYSEAVFLANLVDVLPQHVWGIKEMREAAIENVIDVMHSYDKNNIDGITLEGCVKTFLKERYQVSDDNLKKLYHPSMLDPYPRQRPNDEGVFQLGSPRISSVKNPMAMHSLFRLRKVVNLMLKKGYITPDTKVHIEFSRDLNDANKRWAIQTWQRENEKERERCRKEIEKYIASPSDTDILKYQLWEEQNHKCLYTGDEIRITDFLGDNPKYDIEHTIPRSAGGDSTKMNLTLCSSRFNRDEKKTKLPAELVNHDEILERISNWKEKYEDIDKQIRKISTKGATSKEDKDSKIRRRHYLILQRDYWRGKYQRFTMTEVPEGFSRRQGTDISVISRYARMYLKSVFKQVYIVKGIATSDFRKMWGIQDEYAKKERVNHVHHCIDAITIACIGKAEYDKLADYRHQYDDYLFQGKTKPTFDKPWPSFVIDIKHIQDELLIAHYAKDNLEKFTKKNLRGKDGRIIRDKFGNKLQMKGDTSRNSLHNDKFYGAINHEGEIKYVYRTNIEALDAKSIGNIVDPTVRSIIESAIAIHGSLKAAINKGIWMNEEKHIPIKKVRVFRNDVKKPIELKDQRDLSDKDYKQHYYVTNDGNYMMLIFSKLNNKGREIRQHVVINSLEATEVIKSHKRSQVGKVVWESYYSKEGFDLIYKLKSGTMILLYENNRDEVWDLDIRNLQKRLYIITKMKYDGRIYMMHHQEAREKKDLEEKSGSFKINEDYRPLIVNSYNQFNALVQDLDFEINDLGEIRRLI

SEQ ID NO: 145 - protein, 1178 aa, Scardovia inopinata
MGKRHNSNMAKKKISYRIGIDVGLNSTGLAAIEVDDDGAPIRILNTMSVIHDGGVDPDAAKVRGTRLAISGIARRTRRMRRRRAKRLDRLEQILEKYGYTDTEPVLEEPYGPWICRAELADGFINDDEQRRMMIGIAIRHIARHRGWRNPYQNVRALLNIDDSDLSEEYKNLKEKVQDQINDGKDLPNFTPSQLVRDYLDNFSGQPAARIRTGKAGPRGNRRDAVGILPQRMRQSDYAYELQRIFDMQKIGRDEAQELLMAVFEAKSPKGSAEKRIGKDPLTGKKRALKASLAFQKYRIVATITNLRIKTGTGSERMLSPTELNDIYTYLLRVQDDNHLPTWEDICEEVLHIGRYQLAGIGKTFEGGERISNMPPVIQTSLAIHGLSEGTLAEKLTKWWDKADDDSRESMIKLLSNTVDIDRVNEVDENFASALDFIDSLDDEELTKLDKIALPRGRAAYSEEALNKLTADMLNTGDDLFSARQRIYHVNNSWRPPQPPIGEPLGNPAVDRVLKITNRYLMNCLNRWGQPRRVTIEHTRSGFTSVKQATEHQKISDKRAEYRRDIVKQLEEAGVESVHEYDIRRWEAVQRQNGQCLYCGRDITFKTCEMDHIVPRKGPGSTNTRTNFAAVCPECNRMKSNIPFASWAETKEAKDRGVSLDKAIKQVRFFNFTKNEYSPQAQRNFKKSMIERLKQKTSDEPLDNRSIESVSWMADELYKRIDWYFNHEQYETSKKAINDDKDNLSGTQVVVYPGSITAEARNAAGLGGNIHFIGGRYKTRLDRRHHAVDACVIAMMEPGIARILTERNQLRQAQRLTARIEDDEVNWKDYPTENTAGYNKYQAWSDRMHALLEYMNNALDYDKIPVVRWERLQLGNRSAHEDTIHPLKKLPLSHEISAIDINHASTPALYEALVSLPDFSEQDGLPADPSRQINVNGERYSGDDLVSFFNSNAAQIAIQGGSAELGTAFHHARIYRCWTVGKNGKKKIFFGMIRVYQHDLLHAKNEDLFTYPLKRSSVSMRYAKKEVVHAILSGNAEYVGYLCVGDELVLDLKGDKSNDEGGSRLSGQVGEFVQKFEEDSKVNSQIVNRWTVDGFPDEAKLRLRPSMFAGEGLKNMKSELVENAAIKNILSKTGWRVSVDVISKKSPVVLRRNAFGEPRWKTNAGLPVSYRWQDTETKE

SEQ ID NO: 146 - protein, 1371 aa, Gordonibacter pamelaeae
MNLRNVESYQVGLDIGTGSVGWAVLDDNGDLCRFKGKPTWGSRVFPTAETAAEARVHRGQRRRYDRRRQRIDLLQRFFADEVAKVDPEFFIRLNQARLHPENRDPAHADYRWPLFNGSNFTEKDYYRQFPTIYHLRAHLLKSDEPADIRLVYLALHNIVKHRGNFLHQDNPSLSARNANVGDAVEALCLALDEWCGAHDVECACDEAALAEALGDASLRPGEKRERAEAALGVEKAHKKLAKAVSSAVVGYAAEFGHVFFAESEGSKFALSNDEKVEAYVCPDEGRDLFDAMRAVHSSYVLMGILSEAQGELLSVCKVGEYERYKRDLETLKSLVRAYGPERYDEFFCGPFYEGTRDYDPGKAQGYTKYNLGASKLSHEDFLKEVQKLLKDIGAQADERYADIERAIEAGAFLRRLKTSDNGTIPYQLHLEEMDAIIERQAAFYPFLAQEKDKLKSLVSFRIPYYVGPLTQKNAARDGKGEARFAWSSRKPGMEDARVYPWNWEDVIDKDQSAEDFIRRMTGTCTYLKGEPVLARCSLDYELFCVLNELAGARWTQDGDKSYRFDAADRLGIVEDLFKKRKRVTYEAAEKWLARTHGPESGKSAGGAYHVSGGQGEDAFESQLSSHYDFCKILGVDELSDADEAMAEDIILWNTVFEDRSILKRKIKLAYGDRLGDAQVRKLCQKRYTGWGRLSGELLRGLRSATDNGPKTIMDILLEGDPNHARRMGAAMNLMEILHDDLLEFQAKIDEHNRERALAVGGMSVDEVTGSPALRRGINQALRVVDEIAGIAGKPPAHIYVEVTRDEGARNKGRRTTSRYRALEAALSSIKAQCADVYAELKERDPRALDDERLTLYFMQCGKCMYSGDALDINKLQTYQVDHILPQSYVKDDSFENKVLVRPDTNQRKGDTLLLDERLIARMRGFWRTLRDAELIGEKKFNNLTRTSVSDEQMKKFVSRQLVETGQMVKQVQQLLQARYPESEVQPVKAGVSHQLRVGCALAKSREINDFHHAHDAYLACQVGRFVQYRHSAVYSEPVKMAAVVKQFIKKQAEDYRRTRELPGSDGFIVSSFMTPGFDVKTGEVFRDAWDAGAEIDRIRRCFDYKDCFISRMPEETHGAFWDATIYSPRAAGKTLSLPLKRGLDPRKYGSYSREQFAYFFVYEAVKPKKKQRVLEFAPVPVRVASALANDPDALEDYARELAEAEGLVFERIRRRKVYKYQQIIVGDSRLYVTGREEVRNARQLAFSQDETKLICRIEQGEECEEGELLDLFRSMQRKYLACAPRLARLMKVAEMEEGFIAATASGKREVLLSLTSIAAAHRNSIDLKPIGRKGSSGQMKITFSKELSTNGILFVDSSVTGMFERRCRLGL

SEQ ID NO: 147 - protein, 1388 aa, Zunongwangia profunda
MKRILGLDLGTNSIGWALVNEAENEKEISKIIKLGVRVNPLTIDEKTNFEKGRPLSTNADRTLKRGARRNLQRYKLRRENLIEILIDNHIITKETPLTEIGKGTTYQTLSLRAKAVRERIDLEDFAKVLLAINKKRGYKSSRKASNDEEGQAIDGMAIAKELYERGITPGQYVLELLENDRKYIPDFYRSDLKQEFNKIWNNQKTFYPEILTDELFKELDGKNKSQTWAICQKPFNIKGIKRITKGREKTIENYHWRVKGLSGKLNLEKLAIILQEINNDINQSSGYLGGISDKSKKLYLNKETVGEFLYKQIAKNPHTSLKNQVFYRHDYLDEFEQIWKTQSNFNANLTDELKQEIRDVIIFYQRKIKSQKSLISFCQFESWEQEYFDKETGKTKTRTVGRRVIPKSSPLFQEFKIWQNLNHLVFTNSETDEKIEIKEVEQEIRKELFEELNLRGDLNPNDLLKILRSQFKIGKLSNWKCNFEKIEGNRTNAALFNIYQKISDFEGYGIDWNKSNAKKIRKELKATFPEIGIDASILEFDAYKKQLTNQSSYELWHLLYSAEEDFKISEQDKLIYGNSSVSLKKKLHLKFGFNPEYAKMLANLSLMSDYGNLSAKAIKKILPYLEDGHLYSEACRLAGYNHSKSLTAEELEKFEPKAKLDLLKKNSLRNPVVEKILNQMVNVVNQVIDTYGKPDGVRIELARELKKSAKERAEMTKGIADGTRRNEEIKKIITQKFGIPNPTKSDLVRYRLWQELESRGYKDIFTDKYISPDKIFSSEIDIEHIIPKALLFDDSFSNKTLSFRNVNLKKANRTALDFITQDYQSNVEAYKERVETWNKDNHISKGKRNKLLMSLKDIPDGFIERDLRNSQYIARKAKRMLYEVFPNEVLATSGSITDKLRSDWDLINVMKELNLPKYKALGLTEYEERLDKGTEELFKHEVIKDWTKRNDHRHHAMDALAVAFTTHNHIQYINNLNARKDITQDNHPIIKNIENLITEVNSKGKRVFKAPMSSFRESAKEQIEAILVSFKNKNKVVTKNINQTKKEGGFNYQNAKTPRGQLHKETIYGKSKQPLEKPVKINNRFCKKQVGLIINFKEQEAVLHHLKKYDNNEKIAFSNKTLKSDPIQVNGSPLREVKIFEEIFTIRKDINPDNFKTQKHLDKIIDKGIKEVMKKRLEEYNGDFKTAFSDLDKNPIWLNQSKGITIKRATISGVTNAEPLHQAKDHLGNIILDDNGKEIPIDYVSTGNNHHVAIYQDESGNLQEEVVSFYEAVIRKNQDQPIIKKRHPKGWKFLFTMKQNEMFVFSSENFNPSEIDLLDEKNAAIISPNLFRVQKIATKNYMFRHHLETEVTNNLDFTYRHFQATEWLRNLCKVRIDHIGRIVQIGEY

SEQ ID NO: 148 - protein, 1082 aa, Methylosinus trichosporium
MRVLGLDAGIASLGWALIEIEESNRGELSQGTIIGAGTWMFDAPEEKTQAGAKLKSEQRRTFRGQRRVVRRRRQRMNEVRRILHSHGLLPSSDRDALKQPGLDPWRIRAEALDRLLGPVELAVALGHIARHRGFKSNSKGAKTNDPADDTSKMKRAVNETREKLARFGSAAKMLVEDESFVLRQTPTKNGASEIVRRFRNREGDYSRSLLRDDLAAEMRALFTAQARFQSAIATADLQTAFTKAAFFQRPLQDSEKLVGPCPFEVDEKRAPKRGYSFELFRFLSRLNHVTLRDGKQERTLTRDELALAAADFGAAAKVSFTALRKKLKLPETTVFVGVKADEESKLDVVARSGKAAEGTARLRSVIVDALGELAWGALLCSPEKLDKIAEVISFRSDIGRISEGLAQAGCNAPLVDALTAAASDGRFDPFTGAGHISSKAARNILSGLRQGMTYDKACCAADYDHTASRERGAFDVGGHGREALKRILQEERISRELVGSPTARKALIESIKQVKAIVERYGVPDRIHVELARDVGKSIEEREEITRGIEKRNRQKDKLRGLFEKEVGRPPQDGARGKEELLRFELWSEQMGRCLYTDDYISPSQLVATDDAVQVDHILPWSRFADDSYANKTLCMAKANQDKKGRTPYEWFKAEKTDTEWDAFIVRVEALADMKGFKKRNYKLRNAEEAAAKFRNRNLNDTRWACRLLAEALKQLYPKGEKDKDGKERRRVFSRPGALTDRLRRAWGLQWMKKSTKGDRIPDDRHHALDAIVIAATTESLLQRATREVQEIEDKGLHYDLVKNVTPPWPGFREQAVEAVEKVFVARAERRRARGKAHDATIRHIAVREGEQRVYERRKVAELKLADLDRVKDAERNARLIEKLRNWIEAGSPKDDPPLSPKGDPIFKVRLVTKSKVNIALDTGNPKRPGTVDRGEMARVDVFRKASKKGKYEYYLVPIYPHDIATMKTPPIRAVQAYKPEDEWPEMDSSYEFCWSLVPMTYLQVISSKGEIFEGYYRGMNRSVGAIQLSAHSNSSDVVQGIGARTLTEFKKFNVDRFGRKHEVERELRTWRGETWRGKAYI

SEQ ID NO: 149 - protein, 1186 aa, Gardnerella vaginalis
MEGNISYAIGIDVGLNSVGLAAIRLDNNGEPIRILKAMSVIHDAGIDPNGAKESDTRKAISGVARRVRRLYRQRRRRLQKLDFLLHSLGFPVVENKDLDFSDSFTPWIFRAKLADEYIADEKQRKQMLSVAIRHIARHRGWRNPYQSIKSMTQETEYSEFYNELLKNIEKFAPGVSCEGSTPAQLVRDYLLSQQGKASRRLRITTDDRRKNHPNSLDPVLPRKLMQSDNMLEILNIFNVQHIDNKYVREQIINAVFYAKSPRGSAENRVGKDAITGKGKRALKASLAFQKYRIISTISNLRIRENSKERCLTIEEKQSVYKLLTTSTDEYSKEKSAEAPLYTWIDVADCLGIERYKLRGVGSQIEDGESVGNRPPMLNSELAILYANAKSLKQSLITWWLAANRTQEDKEAFIEILSNTVDIEAIHDNPEYQDKYGSVIAFIDSMDETEIAALENISLPNGRAAYSLETLDKLNKQMLETDDDLFEARKKLFNLPNNWRPSEAPIAEPTGNPSVDRVLKIVHRFLISAKNRWGNPERINIEHVRSGFQSKKMANSYKKLLDKRTEGKENLKAMMRNSLHLGTSDSISDADIRRYEAVQRQNGQCLYCGSEITYHTCELDHIVPRKGPGSTNTRENLVATCSSCNAQKCNTPFATWCEESTYCKNHDISVDSAINRVRAFIFPPNSYDKRGASQFKKEVIARLKQKVGDEAFDNRSIESVAWMANELHRRIDWYYNSQNYQTNNGISDITNKAQTNVGVYAGSLTAIARRMSGIDGKLEFFDGRRKTRFDRRHHAVDASVIAMMTPGIAQILAIKCNLRETQLLQGNKVVPGGIDWKEYPTANDQGYQQYANWSVRMNALLELLNEEMRADRIAVVNSIRLRYSNSSVHKDDVHALLKLHVGDEIDSETIRRASTPALYCALTRNPDYDVNNGLPENTDRTILLHDKKLNADDSITFFKSKAAQLFVREGSVEIGNSIHHLRIYEYFEKLKSGKVKKSYGMIRVFQDDLHRYIHEDLFSCDLPEQSISMRYADTKVAHAVQTGNANYLGYLVPGDEIIVDFSHVKLSGYIGEFVEFLNKIGANCAAYKHWVVAGTDDKTTLILKPSMISSEGIDKLYSNCERNNFDYASYEKSIDKILVDKGWRVSVNVLDQYKAATIRRNALGEPRWASRSHLPISWSWDTGENRE

SEQ ID NO: 150 - protein, 1434 aa, Bacteroidetes oral
MKNILGLDLGTNSIGWAYVKQAQNDSEKSEIAELGVRVNPLTVDEKTNFEKGKPISTNADRTLKRGARRNLQRYKLRRQELIELLKDYQVISDKTILAEDGKETTFETLRLRVKSAKEQVSLEELARILLMINKKRGYKSSRKAKNEDEGQLIDGMEIARRLYDENLTTGQLSLQLLKEGKKSLPDYYRSDLQHELDKVWNFQKQFHPDILTDEFYTSIQGKGQKATRESFSSKYGIDTAENKGSREEKKLQAYQWRADATHKELTKEELAFVITEINNNINNSSGYLGAISDRSKELIFANETVGEYLWKQIQNDPHTSLKNQVFYRQDYFDEFERIWETQSGFYPQILTESLKNELRDILIFYQRKLKSQKALVSICEFESKEIPLKDKQGNPISKNGIPVTKLVGPKVAPKSSPLFQEFKIWQNLNNVLVRPKGSRKRKVTTNQQSTLLEGQEPVFELNLEQKELLFEELNLKGNLKTDYCLELIGYSAKEWEMNYPTLEGNKTNKALYEAYLKIIDSEGYDAKKLLKVKTDKDDINLDDIKVSASEIKTMISDIFNELGINTKILDFDAELERKQFEAQASYRLWHLLYSYEGDDSKSGNELLYRLLEDKFGFKREHSKTLANVSLLSDYGNLSTKAIRTIYPYIKENKFSTACELAGYRHSKLSISKEENENRTLKDTLDVLKKNSLRQPVVEKILNQMINLINELIEKHSEKDEKGNIVKYFKFDEIHIELARELKKNAEERRELDSKVREGKDRNEKIITILKSEFGLPYPTKNDITRYRLYEELKDNGYKDLYTNTYIPREKLFSKEIDIEHIIPKSRLFNDSFSNKTICYRQDNLNKGERTAYDYIEGLGKTQLDEYLNRVENLYTNKFITKAKYRNLLKKESEIGDGFIERDLRETQYIAKKAKEMLLQITRHVVSTTGSITDRLRDDWELVNVMRELNLPKYKVLGLTEIQERKNGQTVEVITDWTKRNDHRHHAMDALTVAFTKHSHIQYLNFLNARKDEKHKEYSNIMGIQQLETEKTTDKDGKDRRVFKTPIPNFRQVAKEHLESILISHKTKNKVVTRATNKIAGSKKQQETLSPRGQLHKETVYGKYRRYVQKEEKIGSKFDLQTIERVANPLYKRLLTKRLEENGGDPKKAFTGKNALAKSPIYLDETQTQQLPEKVKLVWLETDFSIRKDITPDNFKDEKSIDKVLDEGIKRILKDRLKSFDGDAKRAFTDLEQNPIWLNKEKGIAIKRVTISGVSNAEPLHTKKDHLGNEIFDDTGKPIPVDYVSTGNNHHIAIYRDENGNLQEKAVSFFEAVTRANQGLPTVDKTYNQHLGWQFLFTMKQNEMFVFPNKETGFDPQEIDLLDPKNKKLISPNLFRVQKISTKNYFFRHHLETSVETHNALNGVTYKSQLGLNGITDIIKVRINHLGDIVHIGEY

SEQ ID NO: 151 - protein, 1341 aa, Peptoniphilus sp.
MWGSRLFEEASTAQDRREHRSNRRRLERRKYRLDLLEELFVEEINKIDPEFFIRLRESKFHFEDRSLKNTFILFNDKMEGGYNDKVFFSKYPTIYHLRSALINGNKEDVRAVFLAIHNILKNRGHFLLAGNDINISLSLNDTLTDLFEYLKIHLGIEVEFENKLKDIEKIALDKNLSKSDKQKKIVQLLETDYKKQLADVFKLSLGLTANMENIFGKENEQGLEFINAENKIKKIQFDSSYEENIAEFDQFYGEYFEIIDICKKIYDAISLSQILVDGKGLSESKVLSYEKHKEDLKLLKKVLKNIDKAYDNKGEDRLVYKVLKEDKDKGTNYVNYSKLSNNGTATTKEEFYKFLSKNLDLKKFGKLNKEDIETLDYINSEILLGRFLPLQKEKINGVIPYQLQMKELTQILNNASKYLPFLNKIEDGMTVKDKIISLIKFRIPYYVGPLNEYNRIENGNGFAWIEKKKNEKIFPWNFNDVVDIEKSAEKFINNLTNKCTYIKEETVLPKNSIIYSKFMVLNELNNLQYGNKKLDIELKMKMYTDLFLEKKDNRKVTEKRILEYFRINGINDGKEKLTGLNNEIHADMKSYRDMCEIMGENFNINVAENIINWITVFHGEKKILINKIKNVYGKMFNDEQISKLSKLNYSDWGRLSKKLLTDIKCYIDADGINFPVSILEAMEVSNKNLMELLSNKYEFISCIDDINNKYFGDRDISASELIDELYVSPAVKRGIWQSVRILEEIVSIIGHNPKKIFIEMTRHNEEKVQKSSRRHNLEELYKAIRKDPEYVELIKEFDSTTDTDSFKIKKLYLYFMQLGKCAYSKEKIDFDKLFTDSYDIDHIYPRSKTKDDSIHNNLVLVKAKYNREKTDVYPIDINIQKNMNSFWNFLYTKKFITEEKYKRLIRTSDLTDEELAKFISRQLVETSQSTKATAEVLKQIYGDSDICYVKAENVSDFRYGSSRQKDKNDIQKLFVKCREVNHFHHAKDAYLNIVVGNVYDVKFTKNPVNFIKKNKMGNKSNYSLNHMFCFDVERNGYKAWDSSETIKTVGRMMKSNDVRITKHVHPTRGELYDATIYKAKIAKTGSYMPLKSSKNTPLSDVTKYGGYTKIKIAYYSVYKYKFSDKNLIKTEIRLIPIPIYLSKNDDDIKEYVKNYLNDRVNSKLIDFTKIYDKLYVNSLIKINGYLYYLGGKTNDRVWIDNAVSIVLDDKIEYLIKRISNDIKYGYEINVSDDELMDIYESLAEKANKKIFYNRLSDFEKIFSNMDVKKKFVKLEKNDKCRVLLQLLNVLTDSQTTYKLEMVGLKHSRSNIGMKISNLEEFKVINSSITGLYSNEIDILNI

SEQ ID NO: 152 - protein, 1391 aa, Lactobacillus gasseri
MTKIKNEYIVGLDVGTNSCGWVAMDFQNTILRMHGKTAIGSHLFDAGNSAADRRAFRTTRRRIKRRKWRLKLLEEIFDPYMTEVDPYFFARLKESGLSPLDKRKNVSSIVFPTALEDKKFYCNYPTIYHLRYDLMSEDKKFDLREIYLAIHHIVKYRGNFLYNTPVKDFEASKIDVKDSLEKLNELYERLDSEFTVELDSSNALEIEKIIRDKKVFKINKVKSIHQLLSLKTENKERTKLIKDVSKQIINAILGYKTKFETILLKNISKDEADDWEFKLTDVDADNKFENLIGDLNENEQEILLEIRNLANAITLSNIVEEGKTLSESMIDKYNKHSDDLELLKQVISDHPDRDKAKKLALAYDLYVNNRHGKLLQAKDVLGSKKTLSKEDFYKEVKKNLDDSKASQEILDTIALDSFMPKQRTNENGVIPYQLHQLELDRIIKNQGKYYPFLKEVNPVSSHLKEAPYKLDELIRFRVPYYVGPLISPNESTKNKQTKKNQNFAWMIRKEQGQITPWNFDQKVDRMASANKFIKRMTTKDTYLLGEDVLPANSLLYQKFTVLNELNNIKINGKRISVPLKEELYNNLFKKNSTVTTNKLKSYLKENYNLINVEIKGLADEKKFNSGLTTYNKLRNLKIFDQQLDDLNYDKDFERIIEWSTIFEDKAIYKDKLKTIKWLSDRQIDKLSKIRMQGWGQLSKKLLSQLTDNNGQTIIEQLWDSQNNFMQIVNQSDFKDAIAVANQNLLVNTSVEDILNEAYTSPANKKAIRQVVKVVDDIVKAASGKVPKQIAIEFTRDADDKAKISQTRANKLRKVYKELSNELASETIRNELERVAKDQKLLKDKYYLYFMQLGRDAYTGEPINIDDLGQYDIDHILPQSFIKDDSLENRVLVKKAVNNGKSDNVPVKLYGNRMAADLGMTIRHMWEKWKDQGLITKTKYNNLIIDPDKINKYESSGFIHRQLVETSQIIKLVSTILQSKYPDTEIIVVKARYNHYLRKHLNLYKSREVNDYHHAIDAYLSAICGNLLYQVYPYLRPFFVYGQYKKFSSDPKKEKIIYDKTRKYNFISQIFENKSNDIISLETKKKVFDKKDIIEKLKHAYNYKYMLVSRETETHDQEMFKMTVYPRLSRDTKKSRNLISKKKDMPTEIYGGYTNNSDAYMVIARINKKKGTEYRVFGVPMRELVNLRKAEKNGRYNAYLKQVLEPEIMYSKNGKKNKTISSFEIVKAKVPYKQVILDGDKKFMLASSTYVQNAKQLTLSQNSMQAITDNCENDTEEEKALEEKALIEAYDEILTNIDKYLPLFDINKFREKLHAGREKFINLSLDVKKDTILQVLNGLHDNAVMPKIKSLGLSTPLGFMQFSSGVPLSENAKLIYQSPTGLFEKRVKISDL

SEQ ID NO: 153 - protein, 1426 aa, Sphingobacterium spiritivorum
MKHILGLDLGTNSIGWALIKQDFENKQGEILGMGSRIIPMSQDILGDFGKGNSVSQTAERTKYRSVRRLRERFLLRRERLHRILNVLGFLPEHYASQIDFTKRFGKFKEETEPKLVYSNEGFIFKKSFEEMLSDFKTHQPQLLEDNKKIPYDWTIYYLRKKALSRKIEKEELAWILLNFNQKRGYYQLRGEEEEENPNKLIEFYSLKIVDVLADEPQKGKSDIWYSLILENGWIYRRSSKTPLFDWKEKTRDFIVTIDLNDDGSVKTDKEGNEKRSFRAPGENDWTLVKKKTEQEIDSSRKTVGTYIYETLLKNPKQKIKGKLVRTIERKFYKTELKQILEKQKEFHPELRQDDLYSDCVRELYKNNEAHQLTLSKKDFVHLFMEDIIFYQRPLGSQKSSISNCTLEFRKYKDENGTEHTQYLKAIPKSNPYYQEFRIWQWMYNLNIYKKEDDTNVTKDFLNTKADFESLFEFLNNRKEVDQKALLKHFKLNDKTHRWNYVEDKKYPCNETKTMILSRLDKVENISDDFLTREMEQKIWHIIYSVNDKVEYEKALKSFAGKNNLEDNSFFEAFKKFPPFKSEYGAFSEKAIKKLLPLMRMGKFWNYNNISEQSKSRIQKIITGEYDENIKDKVREKAIHLTTETDFQGLQLWLVQYIVYGRHSEAAMLGKWNSADDLEEFLKEFKQHSLRNPIVEQVITETLRVVKDIWQKYGNGAKDFFREIHIELGREMKLPAEERERLTRQISENENTNFRIKALLAEMMDDNSVENVRPFSPMQQEILKIYEEGVLNSDIEIEDDILKISKTAQPSSSDLKRYKLWLEQKYKSPYTGQIIPLNKLFTPEYEIEHIIPQSRYFDDSFTNKIICESAVNKLKDNYIGLEFIKKLGGSIVECGNGKSVAILKHDAYEDFIKKHYANNRSKRNKLLLEDIPEKMIERQMNDTRYISKYISGVLSNIVRVEDGTDEGVNSKNIVPGNGKITTQLKQDWGLNDVWNDLILPRFERMNHLTNSTDFTAWNENHQKFLPTVPVEFSKGFSKKRIDHRHHALDALVIACATKDHVNLLNNQSAKSDTKRYDLKKKLMKFEKVAYNHPQTGERIEREAPKQFLKPWETFTIDAKNHLETIIVSFKQNLRVINKATNYYEKYVEKEGTKVKERVEQKGTNWAIRKPMHKETVSGKIDLPRIKVPKGKILTATRKSLDTSFNLKTIGSITDTGIQKILKNYLQYKDNNPELAFSPEGIEDMNKNIEKFNNGKAHQSISKVRVFELGSKFPLGQSGNKKEKYVEAAKGTNLFFAIYQDKNGKRSYETIPLNEVIERQKQGLSVVDLKGVDDFYLSPNDLVYVPSEDELENISMIDFNKMSSERIYKVVSFTGNQIFFVRQDIATSVVNKAEFSTLNKMERAIDGTMIKETCVKLQIDRLGNISKI

SEQ ID NO: 154 - protein, 1361 aa, Lactobacillus casei; identical to SEQ ID NO: 70

SEQ ID NO: 155 - protein, 1436 aa, Bacteroides fragilis
MKRILGLDLGTNSIGWALVNEAENKDERSSIVKLGVRVNPLTVDELTNFEKGKSITTNADRTLKRGMRRNLQRYKLRRETLTEVLKEHKLITEDTILSENGNRTTFETYRLRAKAVTEEISLEEFARVLLMINKKRGYKSSRKAKGVEEGTLIDGMDIARELYNNNLTPGELCLQLLDAGKKFLPDFYRSDLQNELDRIWEKQKEYYPEILTDVLKEELRGKKRDAVWAICAKYFVWKENYTEWNKEKGKTEQQEREHKLEGIYSKRKRDEAKRENLQWRVNGLKEKLSLEQLVIVFQEMNTQINNSSGYLGAISDRSKELYFNKQTVGQYQMEMLDKNPNASLRNMVFYRQDYLDEFNMLWEKQAVYHKELTEELKKEIRDIIIFYQRRLKSQKGLIGFCEFESRQIEVDIDGKKKIKTVGNRVISRSSPLFQEFKIWQILNNIEVTVVGKKRKRRKLKENYSALFEELNDAEQLELNGSRRLCQEEKELLAQELFIRDKMTKSEVLKLLFDNPQELDLNFKTIDGNKTGYALFQAYSKMIEMSGHEPVDFKKPVEKVVEYIKAVFDLLNWNTDILGFNSNEELDNQSYYKLWHLLYSFEGDNTPTGNGRLIQKMTELYGFEKEYATILANVSFQDDYGSLSAKAIHKILPHLKEGNRYDVACVYAGYRHSESSLTREEIANKVLKDRLMLLPKNSLHNPVVEKILNQMVNVINVIIDIYGKPDEIRVELARELKKNAKEREELTKSIAQTTKAHEEYKTLLQTEFGLTNVSRTDILRYKLYKELESCGYKTLYSNTYISREKLFSKEFDIEHIIPQARLFDDSFSNKTLEARSVNIEKGNKTAYDFVKEKFGESGADNSLEHYLNNIEDLFKSGKISKTKYNKLKMAEQDIPDGFIERDLRNTQYIAKKALSMLNEISHRVVATSGSVTDKLREDWQLIDVMKELNWEKYKALGLVEYFEDRDGRQIGRIKDWTKRNDHRHHAMDALTVAFTKDVFIQYFNNKNASLDPNANEHAIKNKYFQNGRAIAPMPLREFRAEAKKHLENTLISIKAKNKVITGNINKTRKKGGVNKNMQQTPRGQLHLETIYGSGKQYLTKEEKVNASFDMRKIGTVSKLAYRDALLKRLYENDNDPKKAFAGKNSLDKQPIWLDKEQMRKVPEKVKIVTLEAIYTIRKEISPDLKVDKVIDVGVRKILIDRLNEYGNDAKKAFSNLDENPIWLNKEKGISIKRVTISGISNAQSLHVKKDKDGKPILDENGRNIPVDFVNTGNNHHVAVYYRPVIDKRGQLVVDEAGNPKYELEEVVVSFFEAVTRANLGQPIIDKDYKTTEGWQFLFSMKQNEYFVFPNEKTGFNPKEIDLLDVENYGLISPNLFRVQKFSLKNYVFRHHLETTIKDTSSILRGITWIDFRSSKGLDTIVKVRVNHIGQIVSVGEY

SEQ ID NO: 156 - protein, 1517 aa, Bacteroides sp.
MKKIVGLDLGTNSIGWALINAYINKEHLYGIEACGSRIIPMDAAILGNFDKGNSISQTADRTSYRGIRRLRERHLLRRERLHRILDLLGFLPKHYSDSLNRYGKFLNDIECKLPWVKDETGSYKFIFQESFKEMLANFTEHHPILIANNKKVPYDWTIYYLRKKALTQKISKEELAWILLNFNQKRGYYQLRGEEEETPNKLVEYYSLKVEKVEDSGERKGKDTWYNVHLENGMIYRRTSNIPLDWEGKTKEFIVTTDLEADGSPKKDKEGNIKRSFRAPKDDDWTLIKKKTEADIDKIKMTVGAYIYDTLLQKPDQKIRGKLVRTIERKYYKNELYQILKTQSEFHEELRDKQLYIACLNELYPNNEPRRNSISTRDFCHLFIEDIIFYQRPLKSKKSLIDNCPYEENRYIDKESGEIKHASIKCIAKSHPLYQEFRLWQFIVNLRIYRKETDVDVTQELLPTEADYVTLFEWLNEKKEIDQKAFFKYPPFGFKKTTSNYRWNYVEDKPYPCNETHAQIIARLGKAHIPKAFLSKEKEETLWHILYSIEDKQEIEKALHSFANKNNLSEEFIEQFKNFPPFKKEYGSYSAKAIKKLLPLMRMGKYWSIENIDNGTRIRINKIIDGEYDENIRERVRQKAINLTDITHFRALPLWLACYLVYDRHSEVKDIVKWKTPKDIDLYLKSFKQHSLRNPIVEQVITETLRTVRDIWQQVGHIDEIHIELGREMKNPADKRARMSQQMIKNENTNLRIKALLTEFLNPEFGIENVRPYSPSQQDLLRIYEEGVLNSILELPEDIGIILGKFNQTDTLKRPTRSEILRYKLWLEQKYRSPYTGEMIPLSKLFTPAYEIEHIIPQSRYFDDSLSNKVICESEINKLKDRSLGYEFIKNHHGEKVELAFDKPVEVLSVEAYEKLVHESYSHNRSKMKKLLMEDIPDQFIERQLNDSRYISKVVKSLLSNIVREENEQEAISKNVIPCTGGITDRLKKDWGINDVWNKIVLPRFIRLNELTESTRFTSINTNNTMIPSMPLELQKGFNKKRIDHRHHAMDAIIIACANRNIVNYLNNVSASKNTKITRRDLQTLLCHKDKTDNNGNYKWVIDKPWETFTQDTLTALQKITVSFKQNLRVINKTTNHYQHYENGKKIVSNQSKGDSWAIRKSMHKETVHGEVNLRMIKTVSFNEALKKPQAIVEMDLKKKILAMLELGYDTKRIKNYFEENKDTWQDINPSKIKVYYFTKETKDRYFAVRKPIDTSFDKKKIKESITDTGIQQIMLRHLETKDNDPTLAFSPDGIDEMNRNILILNKGKKHQPIYKVRVYEKAEKFTVGQKGNKRTKFVEAAKGTNLFFAIYETEEIDKDTKKVIRKRSYSTIPLNVVIERQKQGLSSAPEDENGNLPKYILSPNDLVYVPTQEEINKGEVVMPIDRDRIYKMVDSSGITANFIPASTANLIFALPKATAEIYCNGENCIQNEYGIGSPQSKNQKAITGEMVKEICFPIKVDRLGNIIQVGSCILTN

SEQ ID NO: 157 - protein, 1399 aa, Olsenella uli
MNLRNTTDEYNIGLDMGTNSVGWAVTDKAGAIAHFKGKPTLGSRLFDAAQTAAGARIHRSQRRRYVRRRWRLDLLQSLFQDEVSKVDSEFFCRLRQSRLYVGDREKGHADYTWPIFNDSDFNEVDYYKRFPTIYHLRKWLMETDEKADIRLIYLATHNIVKHRGNFLRENNKSLSSRDANPAQAVKSLRLALNDWCSERDYECAWKGEEDDGAIDEAILNVLADGEKGRSDQAKEIAKLTGVDCGDAKQSKQCNEAIAKAIVGLKVEMKNIFGEFPAEKTSYIYLSSDEDVEAVRESCPDDSGELFQALCKLYSAYILQELLSYADPSGQTISANMVAKYKQYGRDLRLLKELTRTYAPQKYDLFFRGETYAGSSDYVVDEARGYTRYNLGTTKANYDDFQKSVKELFKGTDALQDERYQEMMVAFGEQKFLRRLKTSDNGSIYYQLHLEELHTILENQGKHYPFLLSEEDKIESLVSFRIPYYVGPLTRKNAAIGHDGKERFAWSSRKDGMEHAVITPWNWEEIIDRDKSAEDFIMRMTGDCTYLQGEPVLPKCSLLYEEFCALNEFNGAHWTVDGDDERRFDAAQRERIMCDLFRRTRSVTYNKVSDWLERKYNFTGARVRGGQGEHGFESKLGSYIFFCKDVFKTDGLDEADYTMIEQIILWSTLFEDRDILKRKIEEAYGGDRLTSEQIKVICKKRFTGWGRLSKRLLTDIKVNTDTGRKSIMDVLREGNPNNGQRSRTMVFMEVLRDEDLGFQKAIDGLNRDYFREHNNGLMDVNDLPGSPAIRRSINQAVRIVDEIASIARKEPTNIFIEVTREEDDPRKKGKRTKRRYDAIKSALEKFKKDDPSLWKELCEKAPGDMDERLSLYFMQRGKCMYSGRPIKIEELHTGKYEVDHIIPRSYIKDDSFENKVLVYREENQHKTDALLIDSSIRQKMGGYWRMLHDAKLVGDKKFRNLFRNHIDDKAMKGFVARQIVETSQMVKLVQTLFEARYPNTRIVPVKAGISHDLREAAGLVKCREANDFHHAHDAFLACRIGLFIQKRHPSVYDNPIGLARIMRDYARMQAREYKKSHCLAHTQGFIVNSFLSSGFDEETGEIFKDDWDAKAEVEGIRRVLNCRQCFISRMPVEGDTRYGGRYWGETIYSPKGKHKHEIPLKQGLDPNLYGGYSDLLYSYFLIYEASDVSSGERVLRFIGIPTSIAARMANQKRLEEYVSRLALQENLEHVRMVRKIMKKQLIEVDNCRLLVTAADAVTNATELAFSLDEMKIISTCAKCINGADPSAIDKIGNAQDSFFDNLKRRGSDRCALLFSQLKLDKLSQNFYMISSDDKSKILISILDRIRAKSNSVDLSLVGGAKHAAQMKFDFNAKLNNPASSFVLIDQSVTGMFERRTRIGL

SEQ ID NO: 158 - protein, 1398 aa, Veillonella atypica
METQTSNQLITSHLKDYPKQDYFVGLDIGTNSVGWAVTNTSYELLKFHSHKMWGSRLFEEGESAVTRRGFRSMRRRLERRKLRLKLLEELFADAMAQVDSTFFIRLHESKYHYEDKTTGHSSKHILFIDEDYTDQDYFTEYPTIYHLRKDLMENGTDDIRKLFLAVHHILKYRGNFLYEGATFNSNAFTFEDVLKQALVNITFNCFDTNSAISSISNILMESGKTKSDKAKAIERLVDTYTVFDEVNTPDKPQKEQVKEDKKTLKAFANLVLGLSANLIDLFGSVEDIDDDLKKLQIVGDTYDEKRDELAKVWGDEIHIIDDCKSVYDAIILMSIKEPGLTISQSKVKAFDKHKEDLVILKSLLKLDRNVYNEMFKSDKKGLHNYVHYIKQGRTEETSCSREDFYKYTKKIVEGLADSKDKEYILNEIELQTLLPLQRIKDNGVIPYQLHLEELKVILDKCGPKFPFLHTVSDGFSVTEKLIKMLEFRIPYYVGPLNTHHNIDNGGFSWAVRKQAGRVTPWNFEEKIDREKSAAAFIKNLTNKCTYLFGEDVLPKSSLLYSEFMLLNELNNVRIDGKALAQGVKQHLIDSIFKQDHKKMTKNRIELFLKDNNYITKKHKPEITGLDGEIKNDLTSYRDMVRILGNNFDVSMAEDIITDITIFGESKKMLRQTLRNKFGSQLNDETIKKLSKLRYRDWGRLSKKLLKGIDGCDKAGNGAPKTIIELMRNDSYNLMEILGDKFSFMECIEEENAKLAQGQVVNPHDIIDELALSPAVKRAVWQALRIVDEVAHIKKALPSRIFVEVARTNKSEKKKKDSRQKRLSDLYSAIKKDDVLQSGLQDKEFGALKSGLANYDDAALRSKKLYLYYTQMGRCAYTGNIIDLNQLNTDNYDIDHIYPRSLTKDDSFDNLVLCERTANAKKSDIYPIDNRIQTKQKPFWAFLKHQGLISERKYERLTRIAPLTADDLSGFIARQLVETNQSVKATTTLLRRLYPDIDVVFVKAENVSDFRHNNNFIKVRSLNHHHHAKDAYLNIVVGNVYHEKFTRNFRLFFKKNGANRTYNLAKMFNYDVICTNAQDGKAWDVKTSMNTVKKMMASNDVRVTRRLLEQSGALADATIYKASVAAKAKDGAYIGMKTKYSVFADVTKYGGMTKIKNAYSIIVQYTGKKGEEIKEIVPLPIYLINRNATDIELIDYVKSVIPKAKDISIKYRKLCINQLVKVNGFYYYLGGKTNDKIYIDNAIELVVPHDIATYIKLLDKYDLLRKENKTLKASSITTSIYNINTSTVVSLSNKVGIDVFDYFMSKLRTPLYMKMKGNKVDELSSTGRSKFIKMTLEEQSIYLLEVLNLLTNSKTTFDVKPLGITGSRSTIGVKIHNLDEFKIINESITGLYSNEVTIV

SEQ ID NO: 159 - protein, 795 aa, Prevotella disiens
MEKQRILGLDPGTNSLGWAVLDFDNSKQEYNLVRKGEVIFEEGVGKSKRGEFSKAAYRTFYKSTRKHYFRRRLRKIEVLKVLVKYDFCPYLSDDLLKQWHEKKIYPAVKEFMDWQRTSDAEGKNPYYDRHCCLNEKLDLSLKSDRYVLGRALYHLTQRRGFKSNRLIQNNDENEEGKVKKGISELSTEMQEANCNYLGDYFYKLYTEKGNTVQIRKRYTDREKHYKNEFNAICEKQELNETIVKELDKAIFFQRKLKPQRHGVGKCTFEPNNRRCAISHPDFERFRMLCFINNIKIKTPFEENLRPLNNEEKALIEPLFYRKSIKNFDFEEIAKKLAGKNNYCYIKDDSSKQYKFNYRMSQGASTCQTIAKLKSIFGEEWKNGIAETYTNRRKKEGLKKQAEMVDDIWNVLYSVSECDVLKDFAINKLQLDEKTADNFSKTKLAQGFATLSLKAIRKILPFLEQGFGYTEAVFLANIPTVVGKEYWNNEDIRNDIMEEIKTIFYHNTLKTNDSHNTILFCIKDILSNNFDLAPGAIDKLYHPSMINVYKDVIPNEDGILQLGSPKIDAVKNPMAMRSLHIIRKVVNELLREGIINSDTEVRIEYARELNDANKRHAIADWQKKQYGKHQKYRKEIKELFKAETGFEIEPNETDILKFELWEEQNHICLYTGQEIGISEFVGENPKYDIEHTIPRSLGGDSTKMNMTLCENKFNRENKQKKLPSELANHSEILERIDDWKKKIYILQKKYDSIRTHNGMDKENKDKKIVSMQVRISGSSICVYSQNTLLWLQYGYN

SEQ ID NO: 160 - protein, 1428 aa, Burkholderiales bacterium
MGKTHIIGVGLDLGGTYTGTFITSHPSDEAEHRDHSSAFTVVNSEKLSFSSKSRTAVRHRVRSYKGFDLRRRLLLLVAEYQLLQKKQTLAPEERENLRIALSGYLKRKGYARTEAETDTSVLESLDPSVFSSAPSFTNFFNDSEPLNIQWEAIANSPETTKALNKELSGQKEADFKKYIKTSFPEYSAKEILANYVEGRRAILDASKYIANLQSLGHKHRSKYLSDILQDMKRDSRITRLSEAFGSTDNLWRIIGNISNLQERAVRWYFNDAKFEQGQEQLDAVKLKNVLVRALKYLRSDDKEWSASQKQIIQSLEQSGDVLDVLAGLDPDRTIPPYEDQNNRRPPEDQTLYLNPKALSSEYGEKWKSWANKFAGAYPLLTEDLTEILKNTDRKSRIKIRSDVLPDSDYRLAYILQRAFDRSIALDECSIRRTAEDFENGVVIKNEKLEDVLSGHQLEEFLEFANRYYQETAKAKNGLWFPENALLERADLHPPMKNKILNVIVGQALGVSPAEGTDFIEEIWNSKVKGRSTVHSICNAIENERKTYGPYFSEDYKFVKTALKEGKTEKELSKKFAAVIKVLKMVSEVVPFIGKELRLSDEAQSKFDNPYSLAQLYNLIETERNGFSKVSLAAHLENAWRMTMTDGSAQCCRLPADCVRPFDGFIRKAIDRNSWEVAKRIAEEVKKSVDFTNGTVKIPVAIEANSFNFTASLTDLKYIQLKEQKLKKKLEDIQRNEENQEKRWLSKEERIRADSHGICAYTGRPLDDVGEIDHIIPRSLTLKKSESIYNSEVNLIFVSAQGNQEKKNNIYLLSNLAKNYLAAVFGASDLSQITNEIESTVLQLKAAGRLGYFDLLSEKERACARHALFLNSDSEARRAVIDVLGSRRKASVNGTQAWFVRSIFSKVRQALAAWTQETGNELIFDAISVPAADSSEMRKRFAEYRPEFRKPKVQPVASHSIDAMCIYLAACSDPFKTKRMGSQLAIYEPINFDNLFTGSCQVIQNTPRNFSDKTNIANSPIFKETIYAERFLDIIVSRGEIFIGYPSNMPFEEKPNRISIGGKDPFSILSVLGAYLDKAPSSEKEKLTIYRVVKNKAFELFSKVAGSKFTAEEDKAAKILEALHFVTVKQDVAATVSDLIKSKKELSKDSIENLAKQKGCLKKVEYSSKEFKFKGSLIIPAAVEWGKVLWNVFKENTAEELKDENALRKALEAAWPSSFGTRNLHSKAKRVFSLPVVATQSGAVRIRRKTAFGDFVYQSQDTNNLYSSFPVKNGKLDWSSPIIHPALQNRNLTAYGYRFVDHDRSISMSEFREVYNKDDLMRIELAQGTSSRRYLRVEMPGEKFLAWFGENSISLGSSFKFSVSEVFDNKIYTENAEFTKFLPKPREDNKHNGTIFFELVGPRVIFNYIVGGAASSLKEIFSEAGKERS

SEQ ID NO: 161 - protein, 1025 aa, gamma proteobacterium
MGGYMPQLMRYRLALDIGSTSIGWAMIRLSMQNEPIAIIRMGVRIFSDGRNPKDGSSLAVTRRVARQMRRRRDRLLKRKTRLLNALVQKKFFPEDADARKALVVLNPYELRKEGLYRQLSGPEFGRALFHISQRRGFLSNRKTDKKDNDSSVLKKAIVDLRQQLEVENCQTIGEWLFKQQQSGKSVRARLRGKTQKDKAYDFYIDRAMIAHEFDTLWVSQAKYDPLLFNEDARAILRDILLYQRPLKPVKPGRCTLIPDESRAPLALPLTQQARIYQELNHLRITTPALGAQALTVAQRNTIAALLEKSDVTFVKIAKALGLTSTTEFNLQDIKRDRLKGNATAIILARNQYFGRRWHDFNADLQNLIVDKLVNEGSETALIEWLKANTDVDESAAERVSGVTLPEGYGSLSVAALRRLLPALKEDVVVYSEAVKRAGFDSHSALSLIEQTGELYQELPYYGEVLQRHVGFGSGDPNDSPERRFGKIANPTVHIGLNELRKIINALIKRYGNPAEVVVELARDLKLSREKRKEIQEEQKQRQDRNEKRIKDACEILGIDPLVIDRGKRREISQKMQLWDELNPKDAANRRCPYTGDQISIEKLLSAEVEIEHILPFSKTLDDSLNNKTVAMRRANRDKGNRTPYEAFGESLNPDYDYDAILQRASLMPREKRKRFASDGYQQWLRDDKDFLSRALNDTAYLSRIAKEYLTLICPPNSVRAIPGRMTAQLRAMFGLNRLLSEGGIKNREDHRHHAIDAAVIGVTDQGLLQKFSRASARTRELQLSRLVDDMPLPWDTYREHVTRALEHLVVSHKPDHGYQGKMHEDTAWGLRDNGQVTRRVRSEDGGPRQRLLENKNVVKINSTRDFSRHGIDEQGQVNAYKGYVGGSNYCIEIWIDEKGKWNSDVVSTFQAYQIVRELGEKAAWQKLRNPLLSLSAKPLVMRLIIDDVVKMQIAGQNKIMRVVKIAQNGQIFFAEHNEANVDARDKDKNNPFKYISKTAGSLQKAGGIHMAISPIGDARPVRYGR

SEQ ID NO: 162 - protein, 1364 aa, Pediococcus acidilactici
MGDRKYNLGLDIGTSSIGFAAVDENNQPIRVKGKTAIGVRLFEEGKTAADRRGFRTTRRRLSRRRWRINLLNEIFDAHLAEVDPTFLARLKESNRSNLDPKKSFQGSLLFPERKDYQFYEEYPTIYHLRKALMEKDRKFDFREIYLAVHHIIKYRGNFLNGTPMRSFKVENIELDTLFDQLNQLYAEIVPDNELAFDLAQVADVKDVLSSTTIYKMDKKKQLVKMMLLPASNKALQSENKKIVTQFVNAILNYKFKLDVLLQVETDADWSLKLNDEGADDKLEEFTGDLDENRLEIIDLLQRLHNWFSLNEITKDGNSLSAAMVEKYENHHHHLGLLKKVIENHPDAKKAKALKETYTAYVGKTDDKTQNQDDFYKAVEKNLDDSPDAKEIKRLIQLDQFMPKQRTGQNGAIPHQLHQQELDQIIEKQSKYYPFLAEPNPNVKRRKDAPYKLDELIAFKIPYYVGPLVTPEEQAQNGENVFAWMKRKAAGPITPWNFDEKVDRMESANRFIRRMTTKDTYLFGEDVLPAESMIYQKFVVLNELNNLKINGRHLSLKDKQDVYNDLFKQQKTVSIKALQNYYVTKKKAATAPTVGGLADPKKFLSSLSTYIDFKNMFGERVNDPQFQEDLEQIVEWSTIFEDRGIFKAKLQALGWLSEKQIQQLVAKRYKGWGRLSKKLLTGLKNAEGYSILDEMWRSTGNFMQIQSRPEFAALIQQANEKQFEGNDPDNVWENIENILGDAYTSPQNKKAIRQVVKVVQDIEKAVGNPPEKIAIEFTREAAANPQRTQSRLRTLEKLYESAEEVVDAGLTAELAEFKENKHVLSDKYYLYFTQLGRDVYTGDTISLDKLNDYDVDHILPQSFIKDDSLDNRVLTIRAVNNGKSDNVPAKMFGKKMGSFWRYLLDNGMISKRKYNNLITDPDNISKYAQKGFINRQLVETSQVIKLTANILNGIYDKDTEIIEVPAKMNSQMRKMFDLVKVREVNDYHHAFDAYLTIFIGNYLYKCYPKLQPYFVYDNFKKFGNKEDIGHKRFNFLGKIEREKKVVAPETGEILWSNVAPNETIKQIKKVYDYKFMIVSREITTRRAELFNQTVYPKNYHGKLIPIKEDRPTDLYGGYSGNTDAYLAIVALEDKKKGKYFKVVGIPTRVAAKLEKLKQQDSQQYLQALHKVIAPQFTKSTKKGIKKTEFEIVLDKVHYRQLVQDGPVKMMLGSSTYKYNAKQLVLSEKALQVIADDRKFDETQKDDNLIAVYDEILSIVNQSFDLYDINGFRKKLNDNRDQFIDLPAETKYEGRKVVAHGKREMILEILKGLHANAAFGNLKPIGFSTAFGQLQVPNGIILSKNAILIHQSPSGLFERKIKLSDL

SEQ ID NO: 163 - protein, 1364 aa, Peptoniphilus duerdenii
MKNLKEYYIGLDIGTASVGWAVTDESYNIPKFNGKKMWGVRLFDDAKTAEERRTQRGSRRRLNRRKERINLLQDLFATEISKVDPNFFLRLDNSDLYREDKDEKLKSKYTLFNDKDFKDRDYHKKYPTIHHLIMDLIEDEGKKDIRLLYLACHYLLKNRGHFIFEGQKFDTKNSFDKSINDLKIHLRDEYNIDLEFNNEDLIEIITDTTLNKTNKKKELKNIVGDTKFLKAISAIMIGSSQKLVDLFEDGEFEETTVKSVDFSTTAFDDKYSEYEEALGDTISLLNILKSIYDSSILENLLKDADKSKDGNKYISKAFVKKFNKHGKDLKTLKRIIKKYLPSEYANIFRNKSINDNYVAYTKSNITSNKRTKASKFTKQEDFYKFIKKHLDTIKETKLNSSENEDLKLIDEMLTDIEFKTFIPKLKSSDNGVIPYQLKLMELKKILDNQSKYYDFLNESDEYGTVKDKVESIMEFRIPYYVGPLNPDSKYAWIKRENTKITPWNFKDIVDLDSSREEFIDRLIGRCTYLKEEKVLPKASLIYNEFMVLNELNNLKLNEFLITEEMKKAIFEELFKTKKKVTLKAVSNLLKKEFNLTGDILLSGTDGDFKQGLNSYIDFKNIIGDKVDRDDYRIKIEEIIKLIVLYEDDKTYLKKKIKSAYKNDFTDDEIKKIAALNYKDWGRLSKRFLTGIEGVDKTTGEKGSIIYFMREYNLNLMELMSGHYTFTEEVEKLNPVENRELCYEMVDELYLSPSVKRMLWQSLRVVDEIKRIIGKDPKKIFIEMARAKEAKNSRKESRKNKLLEFYKFGKKAFINEIGEERYNYLLNEINSEEESKFRWDNLYLYYTQLGRCMYSLEPIDLADLKSNNIYDQDHIYPKSKIYDDSLENRVLVKKNLNHEKGNQYPIPEKVLNKNAYGFWKILFDKGLIGQKKYTRLTRRTPFEERELAEFIERQIVETRQATKETANLLKNICQDSEIVYSKAENASRFRQEFDIIKCRTVNDLHHMHDAYLNIVVGNVYNTKFTKNPLNFIKDKDNVRSYNLENMFKYDVVRGSYTAWIADDSEGNVKAATIKKVKRELEGKNYRFTRMSYIGTGGLYDQNLMRKGKGQIPQKENTNKSNIEKYGGYNKASSAYFALIESDGKAGRERTLETIPIMVYNQEKYGNTEAVDKYLKDNLELQDPKILKDKIKINSLIKLDGFLYNIKGKTGDSLSIAGSVQLIVNKEEQKLIKKMDKFLVKKKDNKDIKVTSFDNIKEEELIKLYKTLSDKLNNGIYSNKRNNQAKNISEALDKFKEISIEEKIDVLNQIILLFQSYNNGCNLKSIGLSAKTGVVFIPKKLNYKECKLINQSITGLFENEVDLLNL

SEQ ID NO: 164 - protein, 1089 aa, Corynebacterium matruchotii
MNSANVNYRVGIDVGSYSLGMAAIAIDDDGKPTEILSAISLIHDSGVDPDSAKSAATRLATSGIARRTRRLYRRKRKRLAKLDKFISSQGWPLKEFEKYEDPFYPWRVRAELATTAITDQQELGEKLSIALRHIARHRGWRNPYSKVTALYTVTEPSDAFLAMQEECAKQLGRTIPETITVGQLVTGMNLGKTRLRGENSLLAARPRQSDNANEIHTIAKVQGLSNELVRQIIDHVFAAESPKGSAAEQVGKDPLQPTKKRALKASDAFQQYRIAALIGNLRIRGGKGNRRLTTEETRLVFDYLRSLPAKQEPTWQLVAEQLKIDRGNLVGTAIMTDDGERAGAKPPVHDTNRIMENTKIKPLATWWKSADADARAAMVKALSNAEVDDFDSQAGAQVQEFFFGISDEDQEKLDGLHLPIGRAAYSEDTLDRLTKRMIGEGMDLYEARQAEFKISNDWAPPAPEIGERVGNPAVDRVLKATARWLNAAERQWGAPKSVNIEHVRAAFMSESSARELDRDNQQRAKRNVKVVAEMQEKLGIEGRPSRADVWRFQSIQRQNGKCAYCGAEISFKNSEMDHIIPQAGEGSTNTRDNLVAVCRECNSSKSNIAFAVWAENTSRPGVSVQKAIERTHHWVTDSGLRKPEFDKFRKQVCDRLRRKATDEPIDARSLESVAWMANELRSRIAQKFKDGDTKVRVYKGALTAEARRASGISGKLEFVDGKGKSRLDRRHHAVDAAVVAFTSNYVAETLALRSNMKFDQELRRKAPQWREFTGSDHVHQVEWTKWKYRMQALAELLNNALVQDRIVVMHNLRLRLGNGAAHEDTIGKLTRLKVGDAISTTDIDRASSEALWCALTRDPDYDPKTGLPENPNRTIRIHGTHLTASDEITVFPVAAASIPIRDGFAKLGSNYHHVRLFRVPSGKKYKYCLMQVYTVDLLKFRKEDLFTVELKPQTISVRTCEALLRKALANGTAEYLGWLVSDDELLIDTSSFDTPGIVKLREEYGPVNRWRLAGLTSVTRLNLRPLYLSKEGLKPNVNPEIKKIIDNRSWIITVNKLFSSGHVKIIRRDALGRPRLHSAAHLPICWEVK

SEQ ID NO: 165 - protein, 1134 aa, Streptococcus mitis
MNGLVLGLDIGIASEGVGILEKNSGKIIHANSRLFPAATADNNVERRKNRQARRLNRRKKHRGVRFQDLFEDYGLLTDFSKVSINLNPYRLRVDGLNQQLTNEELFIALKNIVKRRGISYLDDASEDGGAVSSDYGKAVEENRKLLAEQTPGQIQLERFEKYGQVRGDFTVVENGEKLRLINVFSTSAYKKEAERILRKQQEFNNQITDEFIEDYLKILTGKRKYYHGPGNEKSRTDYGRFRTDGTTLDNIFGILIGKCTFYPEEYRASKASYTAQEFNLLNDLNNLTVPTETKKLSEEQKKVIVEYAKEAKTLGASTLLKYIAKMIDASVDQIRGYRVDVNNKPEMHTFEVYRKMQSLETISVGELSRNVLDELAHILTLNTEREGMEEAINTKLKDSFSQDQVLELVQFRKNNSSLFSKGWHNFSLKLMMELIPELYETSEEQMTILTRLGKQKSKETSKRTKYIDEKELTEEIYNPVVAKSVRQAIKIINEATKKHGIFDNIVIEMARENNEEDAKKDYIKRQKANQDEKNAAMEKAAFQYNGKKELPDNIFHGHKELATKIRLWHQQGEKCLYTGKTIPISDLIYNQYKYEIDHILPLSLSFDDSLSNKVLALATANQEKGQRTPFQALDSMDDAWSYREFKSYVKDLKSLSNKKKDYLLTEEDISKIEVKQKFIERNLVDTRYSSRVVLNALQDFYKSHQFDTTISVVRGQFTSQLRRKWGLEKSRETYHHHAVDALIIAASSQLRLWKKQNNPLITYKEGQFVDSQTGEIISLTDDEYKELVFKAPYDHFVDTLSSKTFEDSILFSYQVDSKFNRKISDATIYATRKAKLDKEKKEYTYTLGKIKDIYSLGTKTPSKTGFYKFLDLYNKDKSQFLMFQKDRKTWDEVIEKIMEQYRPFKEYDKTGKLVDFNPFEKYRQENEPIRKYSKKGNGPEIKSLKYYDILLGKHKNITPEGSRNTVALLSLNPWRTDVYYNMETKKYEFLGLKYADLPFEEGGAYGISTETYNELREKEGIGKNSEFKFTLYKNDLILIKDTETNCQQIFRFWSRTGKDNPKSFEKHKIELKPYEKARFEKGEELEVLGKVPPSSNQLQKNMQIENLSIYKVKTDVLGNKHFIKKEGDKPKLKF

SEQ ID NO: 166 - protein, 1373 aa, Streptococcus bovis
MTKKNYSIGLDIGTNSVGWAVITDDYKVPAKKMKVLGNTDKKYIKKNLLGALLFDSGETAEATRLKRTARRRYTRRKNRLRYLQEIFAEEMTKVDESFFQRLDESFLRWDDDNKKLGRYPIFGNKADVVKYHQEFPTIYHLRKHLADSSEKADLRLVYLALAHMIKFRGHFLIEGELNAENTDVQKIFADFVGVYDRTFDDSHLSEITVDAASILTEKISKSRRLENLIKYYPTEKKNTLFGNLIALALGLQPNFKMNFKLSEDAKLQFSKDSYEEDLGELLGKIGDDYADLFTSAKNLYDAILLSGILIVDDNSTKAPLSASMIKRYVEHQEDLEKLKEFIKANKSELYHDIFKDKNKNGYAGYIENGVKQDEFYKYLKNTLSKIAGSDYFLDKIEREDFLRKQRTFDNGSIPHQIHLQEMHAILRRQGDYYPFLKENQDRIEKILTFRIPYYVGPLARKDSRFSWAEYHSDEKITPWNFDKVIDKEKSAEKFITRMTLNDLYLPEEKVLPKHSHVYETYAVYNELTKIKYVNEQGKDSFFDSNMKQEIFDHVFKENRKVTKEKLLNYLNKEFPEYRIKDLIGLDKENKSFNASLGTYHDLKKILDKAFLDDKVNEEVIEDIIKTLTLFEDKDMIHERLQKYSDIFTADQLKKLERRHYTGWGRLSYKLINGIRNKENNKTILDYLIDDGSANRNFMQLINDDTLPFKQIIQKSQVVGDVDDIEAVVHDLPGSPAIKKGILQSVKIVDELVKVMGDNPDNIVIEMARENQTTNRGRSQSQQRLKKLQNSLKELGSNILNEEKPSYIEDKVENSHLQNDQLFLYYIQNGKDMYTGDELDIDHLSDYDIDHIIPQAFIKDDSIDNRVLTSSAKNRGKSDDVPSLDIVRARKAEWVRLYKSGLISKRKFDNLTKAERGGLTEADKAGFIKRQLVETRQITKHVAQILDARFNTESDENDKVIRDVKVITLKSNLVSQFRKDFEFYKVREINDYHHAHDAYLNAVVGTALLKKYPKLASEFVYGEYKKYDIRKFITNSSDKATAKYFFYSNLMNFFKRVIRYSNGKVIVRPVVEYSKDTEDIAWDKKSNFRTICKVLSYPQVNIVKKVETQTGGFSKESILPKGDSDKLIPRKTKKAYWDTKKYGGFDSPTVAYSVFVVADVEKGKAKKLKTVKELVGISIMERSFFEENPVEFLENKGYHNIREDKLIKLPKYSLFEFEGGKRRLLASASELQKGNEMVIPGHLVKLLYHAQRINSFNSTKYLDYVSAHKKEFEKVLSCVEDFANLYVDVEKNLSKIRAVADSMDNFSIEEISNSFINLLTLTALGAPADFNFLGEKIPRKRYTSTKECLNATLIHQSITGLYETRIDLSKIGEE

SEQ ID NO: 167 - protein, 1099 aa, Corynebacterium accolens
MSLLYRVGIDVGTYSLGCTAIEVDDNDQPVSILSSVSLIHDSGLDPDQQKRAVTRLASSGVARRTRRLYRRRRRRMVKLENFLTAQGWETLPFERYSDPYLPWHARVALVNGYISDDTQRGQYLSIAFRHIANHRGWRNPYWKVSSLYSPDKPSDAFEQIRKELEASTGRQIPETATVGQLISFAQFGKDRLRGGGKQKDKKKPQEQVNQAVISARLHQIDHAREINEICRVQKIDDTLRKQILDLVFAAESPKGAQKGRVGKDPLQPKLFRALKASDAFQQYRIAALTGNLRIYRNGVTVPLDRDEKLIVFNYLVNLPKKEEPSWLKIAEILNIDRGQLRGTATMTDDGERAGATPPVHDTNRTILDSKVKPLAHWWENASDDERAAMLKSLSNSEVEDFDSPAGAQVQAFFADLDETEQEKLDSLHLPMGRAAYSEDTLMRLTNRMLDENLDLYEARLAEFGIPKDWAPPAPRIGEPVGNPAVDRVLKGVARWLEAAADEWGAPKSVVIEHVRDGFVSKSKAIEIDRANNNRHKRNRELFQKMQENLGIEGKVRSSDLWRYQSVQRQNCQCAYCGSPITYTTCEMDHIVPRAGEGSTNTRDNLVATCHRCNLAKKNIPFAVWAEKSTIPGVSVKEALDRTRHWSEDSGMSKKDFQKFRKNVCERLNRTVVDEPLDARSMESVAWMANELRGRVAQRFQEENTTVNVYRGALTAEARRAAGITDKLRFIDGTGKSRLDRRHHAVDAAVVAFIHNYVAETLAIRSNKKREAQLLQGTSQWKEFTGSDDKHRAVWNAWIPKMQKLAVLLQIALDEDRIVVTSNLRLRLGNGRAHEDTISELKTIRVGDAISVTDIDRASSEALWCALTREPDFDEKDGLPENPNRRIRVHGTWYDAEDEIEVFPVGAGAIKVRGGYAKLSRFHHARVYKIPGKKAPIYCMLRVYNTDLVQHRHEDLFSVELKPQTMSVRQAEPKLRKALAENTAEYLGWLVTDDELIIDTSTFRTGLIEEMQSEFGLVRRWRLDGFDSPSLLTLRPLHMSAEGLPDDCALGSRKIIDTKGWRVSINKVFNAGNTTVVRRDALGRARLTSNAHLPISWKEE

SEQ ID NO: 168 - protein, 1054 aa, Actinobacillus pleuropneumoniae
MKLTPLNYILGLDLGIASVGWAVVEIDEQENPLGLIDVGVRTFDRAEVAKTGESLALARRLARSSRRLVKRRADRIKKVKRLLKSENILLSADEQLPNDVWQLRVKGLDQKLERQEWAAVLLHLLKHRGYLSQRKNESKSENKELGALRSGVAANHQILQSAEYRTPAEIAVKKFHVEEGHIRNQRGAYTHTFSRLDLLAEIELLFTRQTELGNPHTSAKLLENLTALLMWQKPALAGEAILKMLGKCTFEPTEYKAAKNSYSAERFVWLTKLNNLRILEQGAERALTDNERFALLDQPYEKAKFTYAQARTMLALPDEAIFKGVRYQGEDKKAVETKTILMEMKAYHQIRKALENADLKAEWNELKNNSELLDDIGTAFSLHKTDEDICRYLDGKLSESILNALLENLNFDKFIQLSLKALQQILPLMLQGQRYDEAVSAIYGDHYGKKSAEINRLLPTIPADEIRNPVVLRTLTQARKVINAVVRLYGSPARIHIETGREVGKSYQDRKKLEKQQEDNRKHRESAVQKFKEYFPNFVGEPKGKDILKMRLYELQQAKCLYSGKSLELHRLLEKGYVEVDHALPFSRTWDDSFNNKVLVLANENQNKGNLTPYEWLDGKNNSEPWQNFVARVQTSGFSHTKKQRILSHKLDEKGFIERNLNDTRYVVRFLCNFIADNMLLTGKGKRKVFASNGQITALLRGRWGLQKVRDDNDRHHALDAVVVACSTVAMQQKITRFVRYEEGNVFSGERIDRETGEIIPLHFPSPWAFFRENVEIRIFSENPKLELENRLPDYPQYNHEFVQPLFVSRMPTRKMTGQGHMETVKSAKRLDEGLSVLKVPLTQLKLNDLERMVNREREMALYESLKVRLEQFDNDPAKAFAEPFYKKGGALVKAVRVEQTQKSGVLVRDGNGVADNASMVRVDVFTKAGKYFLVPIYTWQVAKGILPNKAVTANVDEIDWLEMDESYQFIFTMYPNDLVKVKLKKEEFFGYYGGLDRATGAIVIKEHDLEKSKGRQGIYRIGVKLALSFEKYQVDELGKNIRPCRPTKRQHVR

SEQ ID NO: 169 - protein, 1369 aa, Lactobacillus iners
MNNNYYLGLDLGTNSVGWAVTDDHYNIIKFHGKHMWGMRLFEEAETAKDRRLHRQARRRRQRLVERINLLEELFDKEISKVDQGFFARKKESDLHFEDKTTKSEYALFNDKSYTDRDYYKQYPTIFHLIMDLIENDKKRDIRLVYLACHYLIKHRGHFIFDGKNFTVDNSFENLLDKLITYLKDNDDITLSFPKDQLINIFKNSNLNSTEKSDQLKPFFGRTNLEKGIIKLLSGGKQDLSNMFRDETLKNSNYKNLKFSDNRFDDERDGYAADLGDRIDLLILLKQIYDASILESMMSQARVSIDGHKYISSAKVCAYEKHKSDLKRLKSLIKKYLPSEYNNIFRKITEKDNYVAYSKSNITNNKREKALKYVKYVDFTKYLTKKLKTIKTQDAEDDQEIFEIKGELEKQSFLPKQRTLDNSIIPYQLHLMELKKILDNQSKYYDFLLAKDDQEGITVKDKIISLLTFRLPYYIGPVNPAVHGKFAWVKRLANGKVTPWNYKEKIDIDASHEEFIKTKLSKCSFLIGCDVLPKNSLLYQKYMVLSELNTIKFNGVNISEKLKDDIYQNLFKNIQKVTKKRLQNYIKEHENIIGDVIVTGIDNAFKQGLVSYLKFKKIIGDKVDDDRYQKVLEKIIRDITLYDECAGKKIKKEYKDSDLFTEDELNKIVKLTFNDWGRLSAELLDQLEGEDTVSGETGKIIEFMQKHNYNLMQLMSKKFTFKSKIDEINKSYYQHDKFNYKSMIDSLYVSPATKRILWQSLKVVHEISKIMKHDPEKIFIEMARSKEDHPKRKLSRKADLKQVYKDSKKQIISIIGKDKYQDLSNELDNKDDRDLRWDNLYLYYTQLGRSMYSLKPIDISELMNKNLYDQDHIFPKSKKYDDSIENRVLVEKELNVKKSDIYPISDANIIPQKIKGQVESFWKMLYDHKLIGDKKYARLIRSKAFTDDELAGFIARQLVETRQATKETADLLKRLCPKSRIVYAKAQNASIFRQKFDIPKSRTINDLHHAQDAYLNIVVGNIFDTKFTQDPRNFIKNTKDSRNYNLEKIYDYNVERNNYVAWIAPDGETNGTIANVKCNLSTKDFRVTRPSFYKKGALFNQNLSRKGSNLAPIKEHSPKSNPLKYGGYSGKNNSFFVVVAGKDNKGKDIVKLIPVNTLIYNKMLHCDYKAKQELLTSYVANNFAINNFRIVKDDIKMYSLVKIDGAYYYLVGGTDERIEVKNAMQLLLSKDSIKAVKILEKESKDQFANIKNYKDIDIKLGRTFNEVVSKYTNSVFGKSMLISDKYRKDIFKSVEKSILEFNHLDTIGKADNLLKFVTLMRPSGSAHSLKMVGLIERIRKSNVISNFNEFKLINQSVTGLFENEEDLLKL

SEQ ID NO: 170 - protein, 1420 aa, Bifidobacterium bifidum
MSRKNYVDDYAISLDIGNASVGWSAFTPNYRLVRAKGHELIGVRLFDPADTAESRRMARTTRRRYSRRRWRLRLLDALFDQALSEIDPSFLARRKYSWVHPDDENNADCWYGSVLFDSNEQDKRFYEKYPTIYHLRKALMEDDSQHDIREIYLAIHHMVKYRGNFLVEGTLESSNAFKEDELLKLLGRITRYEMSEGEQNSDIEQDDENKLVAPANGQLADALCATRGSRSMRVDNALEALSAVNDLSREQRAIVKAIFAGLEGNKLDLAKIFVSKEFSSENKKILGIYFNKSDYEEKCVQIVDSGLLDDEEREFLDRMQGQYNAIALKQLLGRSTSVSDSKCASYDAHRANWNLIKLQLRTKENEKDINENYGILVGWKIDSGQRKSVRGESAYENMRKKANVFFKKMIETSDLSETDKNRLIHDIEEDKLFPIQRDSDNGVIPHQLHQNELKQIIKKQGKYYPFLLDAFEKDGKQINKIEGLLTFRVPYFVGPLVVPEDLQKSDNSENHWMVRKKKGEITPWNFDEMVDKDASGRKFIERLVGTDSYLLGEPTLPKNSLLYQEYEVLNELNNVRLSVRTGNHWNDKRRMRLGREEKTLLCQRLFMKGQTVTKRTAENLLRKEYGRTYELSGLSDESKFTSSLSTYGKMCRIFGEKYVNEHRDLMEKIVELQTVFEDKETLLHQLRQLEGISEADCALLVNTHYTGWGRLSRKLLTTKAGECKISDDFAPRKHSIIEIMRAEDRNLMEIITDKQLGFSDWIEQENLGAENGSSLMEVVDDLRVSPKVKRGIIQSIRLIDDISKAVGKRPSRIFLELADDIQPSGRTISRKSRLQDLYRNANLGKEFKGIADELNACSDKDLQDDRLFLYYTQLGKDMYTGEELDLDRLSSAYDIDHIIPQAVTQNDSIDNRVLVARAENARKTDSFTYMPQIADRMRNFWQILLDNGLISRVKFERLTRQNEFSEREKERFVQRSLVETRQIMKNVATLMRQRYGNSAAVIGLNAELTKEMHRYLGFSHKNRDINDYHHAQDALCVGIAGQFAANRGFFADGEVSDGAQNSYNQYLRDYLRGYREKLSAEDRKQGRAFGFIVGSMRSQDEQKRVNPRTGEVVWSEEDKDYLRKVMNYRKMLVTQKVGDDFGALYDETRYAATDPKGIKGIPFDGAKQDTSLYGGFSSAKPAYAVLIESKGKTRLVNVTMQEYSLLGDRPSDDELRKVLAKKKSEYAKANILLRHVPKMQLIRYGGGLMVIKSAGELNNAQQLWLPYEEYCYFDDLSQGKGSLEKDDLKKLLDSILGSVQCLYPWHRFTEEELADLHVAFDKLPEDEKKNVITGIVSALHADAKTANLSIVGMTGSWRRMNNKSGYTFSDEDEFIFQSPSGLFEKRVTVGELKRKAKKEVNSKYRTNEKRLPTLSGASQP

SEQ ID NO: 171 - protein, 1092 aa, Ilyobacter polytropus
MKYSIGLDIGIASVGWSVINKDKERIEDMGVRIFQKAENPKDGSSLASSRREKRGSRRRNRRKKHRLDRIKNILCESGLVKKNEIEKIYKNAYLKSPWELRAKSLEAKISNKEIAQILLHIAKRRGFKSFRKTDRNADDTGKLLSGIQENKKIMEEKGYLTIGDMVAKDPKFNTHVRNKAGSYLFSFSRKLLEDEVRKIQAKQKELGNTHFTDDVLEKYIEVFNSQRNFDEGPSKPSPYYSEIGQIAKMIGNCTFESSEKRTAKNTWSGERFVFLQKLNNFRIVGLSGKRPLTEEERDIVEKEVYLKKEVRYEKLRKILYLKEEERFGDLNYSKDEKQDKKTEKTKFISLIGNYTIKKLNLSEKLKSEIEEDKSKLDKIIEILTFNKSDKTIESNLKKLELSREDIEILLSEEFSGTLNLSLKAIKKILPYLEKGLSYNEACEKADYDYKNNGIKFKRGELLPVVDKDLIANPVVLRAISQTRKVVNAIIRKYGTPHTIHVEVARDLAKSYDDRQTIIKENKKRELENEKTKKFISEEFGIKNVKGKLLLKYRLYQEQEGRCAYSRKELSLSEVILDESMTDIDHIIPYSRSMDDSYSNKVLVLSGENRKKSNLLPKEYFDRQGRDWDTFVLNVKAMKIHPRKKSNLLKEKFTREDNKDWKSRALNDTRYISRFVANYLENALEYRDDSPKKRVFMIPGQLTAQLRARWRLNKVRENGDLHHALDAAVVAVTDQKAINNISNISRYKELKNCKDVIPSIEYHADEETGEVYFEEVKDTRFPMPWSGFDLELQKRLESENPREEFYNLLSDKRYLGWFNYEEGFIEKLRPVFVSRMPNRGVKGQAHQETIRSSKKISNQIAVSKKPLNSIKLKDLEKMQGRDTDRKLYEALKNRLEEYDDKPEKAFAEPFYKPTNSGKRGPLVRGIKVEEKQNVGVYVNGGQASNGSMVRIDVFRKNGKFYTVPIYVHQTLLKELPNRAINGKPYKDWDLIDGSFEFLYSFYPNDLIEIEFGKSKSIKNDNKLTKTEIPEVNLSEVLGYYRGMDTSTGAATIDTQDGKIQMRIGIKTVKNIKKYQVDVLGNVYKVKREKRQTF

SEQ ID NO: 172 - protein, 994 aa, Streptococcus downei
MENQRGKRQRITHQEPYSIGLDIGTASVGSAVINNDLTVPQKRFKVRDINGNVIKTIKKNMSSVLIFDEANPAKGARTKRTSRRRYTRRNFRLLELKKLFEKEIEKIDPNFFHRIKEDSFFNWNDKEFDKHPLFGNLKEEKKFHNNYPTVFHLRNEIGKNSSKKFDLRLVYLALAHIIKYRGHFLDETFDPDASVSVEKRLNDFIVEYNELFDKDLRSEAKFSEILMSDSSNSVKIESTLSLYPSEKNTIFQVFLKLIVGNQGDFNKFFKDELESSSHSGKLVFSSDEVEDEKEELISIIGEDYLDIINLCQSLYSTVALAKIISTDTGESNTPLSASMVKRYNEHKGDLANLKGIVKHFIPEKYEEVFGEHSKTGYTAYIRNPNKMPEKKFYDYLYHEGEKGKISGILSDSRIYELPAVQKFILKIEQKSFLKKQRTKENGLIPYQLHLKELKIIIENQSEYYPFLHEIEEKLEKLLTFRIPYFVGPLAQTKYINPRFNWLVRKSEDHIKPWNFSEIVDEEKSATKFIEKLISNDQFLFGEKVLPKRSIIYQQFLIFNELTKVSYQIKDGPSRNFDSETKEEIFNSLFKKNKLGCVTVVDLKNYIKNDQCLSEKEDIQIEGIKKKFNSSYSTYADLSEISGLKELLDDDTQLDLVEEIIRILTVFEDKKMRTKQLEKLNLPANVDIEKLCKKHYKGWANVSRQLIDGIADRSRGFKKTILDYLKDDDIPNNDAFSTKVQKSLNRNFAQLITDKSLDFARKLDESYKIDVKKDYPSLVEDIPGSPAIRRAILQSLYTVDEIIGVMGRMPKNIVIEMARTNEVSDSPKTRKERIKKLIKETENDADALNFGISKVSEIFDEVKKDENLFKELEVYLYFLQEGKDMYGTETREGHRQPKEINFYDVKNSTGKYHIDHIIPQSLYSGNPLDNIVLTESTNNKIKDKDVPDEATVYEMKNFWLYLMKKGAISKKKFSFLTKIEQGGLSNEDKFGFINR

SEQ ID NO: 173 - protein, 1052 aa, Aminomonas paucivorans
MIGEHVRGGCLFDDHWTPNWGAFRLPNTVRTFTKAENPKDGSSLAEPRRQARGLRRRLRRKTQRLEDLRRLLAKEGVLSLSDLETLFRETPAKDPYQLRAEGLDRPLSFPEWVRVLYHITKHRGFQSNRRNPVEDGQERSRQEEEGKLLSGVGENERLLREGGYRTAGEMLARDPKFQDHRRNRAGDYSHTLSRSLLLEEARRLFQSQRTLGNPHASSNLEEAFLHLVAFQNPFASGEDIRNKAGHCSLEPDQIRAPRRSASAETFMLLQKTGNLRLIHRRTGEERPLTDKEREQIHLLAWKQEKVTHKTLRRHLEIPEEWLFTGLPYHRSGDKAEEKLFVHLAGIHEIRKALDKGPDPAVWDTLRSRRDLLDSIADTLTFYKNEDEILPRLESLGLSPENARALAPLSFSGTAHLSLSALGKLLPHLEEGKSYTQARADAGYAAPPPDRHPKLPPLEEADWRNPVVFRALTQTRKVVNALVRRYGPPWCIHLETARELSQPAKVRRRIETEQQANEKKKQQAEREFLDIVGTAPGPGDLLKMRLWREQGGFCPYCEEYLNPTRLAEPGYAEMDHILPYSRSLDNGWHNRVLVHGKDNRDKGNRTPFEAFGGDTARWDRLVAWVQASHLSAPKKRNLLREDFGEEAERELKDRNLTDTRFITKTAATLLRDRLTFHPEAPKDPVMTLNGRLTAFLRKQWGLHKNRKNGDLHHALDAAVLAVASRSFVYRLSSHNAAWGELPRGREAENGFSLPYPAFRSEVLARLCPTREEILLRLDQGGVGYDEAFRNGLRPVFVSRAPSRRLRGKAHMETLRSPKWKDHPEGPRTASRIPLKDLNLEKLERMVGKDRDRKLYEALRERLAAFGGNGKKAFVAPFRKPCRSGEGPLVRSLRIFDSGYSGVELRDGGEVYAVADHESMVRVDVYAKKNRFYLVPVYVADVARGIVKNRAIVAHKSEEEWDLVDGSFDFRFSLFPGDLVEIEKKDGAYLGYYKSCHRGDGRLLLDRHDRMPRESDCGTFYVSTRKDVLSMSKYQVDPLGEIRLVGSEKPPFVL

SEQ ID NO: 174 - protein, 1023 aa, Helicobacter cinaedi
MKIYSFDIGVASIGWAFIENEVLQDCGIRIFTKAENPKNGASLALPRREARGVRKRLARRRGRLNTIKQLLCKEFGLQLEDYLSNDGELPKAYTASKANPLKSPYELRTLALSQKLDSKDLVRVILHIAKHRGYGNKHAKDSKDTESGKVKKAIEFNRKTLAEKGYRSVGEYLYREFFQQSRISQNNGATEFINVRNKAGNYEHCVAQDMLKEELESILNAQRQFGFSLKQDFENKLLTKIFEQRPLKSFADKVGNCCFIAGEKRAPKDSPSAIEFIALSRTINTLINLSKESGEIYNRAIILQIVESTLKKGEISYKELREIIRLDERLRFKDPRLDYSREIKEAEKVKFLEFKQLKGFKKALGESFTTLAISQLDEIAEHIALIKDRVKLNEKLESYALTKEQREALSNLSFSAHINLSLQALKQILPFMRGDNGEQCLDYDESVEKAGLKALSKDTLKGQMLPPLNEFEPYLSNPVVARALAEYRKVLNVLLKQYGSPHKIHIEYAREAKLSSTERQKYEKEQKDNYAANQAAHKKCQELGLEPSSTNLLKLKLWQEQGGLCLYSGAKITISYLQDPTALQVDHIYPYSRSFDDSYMNKCLVLTKANQEKGNRTPFEAFGTDSAKWGVITTLAQKLPHKKRRRILNTAFNDKEAGFKLRNLNDTSYIARLVADYTETYLEFLPLVESENTTLSKGQKGSKKHIAIVNGVLTSTMRYYLGFASKDRDNHLHHALDAVIIGFMNDSVIKAFSDFKKTQETSKAAYYAHTLSKQEYKKQRAFIQLPSGENFRVSVLEKVESVFVSKPPRKRVRGALHEATFYSPNDPKLLKNYGGTKGVERALALGKMRKVGAKIVSNGAMVRVDIFRHKSSGKFYGVPVYTMDFALGILPNKAVVVGKDQNGVIKDWLEMDSSYEFIFSLYKDDVILVQKKEMQRPELCYFVSFDTSGASIKVAKHDNNFSTLTENQKLLFSNATKEEVVGKSIGIQNLKVFEKWQVSVLGEVKRTQSYPRENISLASKAKK

SEQ ID NO: 175 - protein, 874 aa, Listeria seeligeri
LANGQSEFSWLTRKADGEIRPWNIEEKVDFGKSAIDFIEKMTNKDTYLPKENVLPKHSMCYQKYMVYNELTKIRYTDDQGKTHYFSGQEKQQIFNDLFKQKRKVKKKDLELFLYNMNHVESPTVEGVEDAFNSSFTTYHDLQKVGVPQEILDDPLNTEMLEEIIKILTVFEDKRMINERLQEFSNVLDEAVLKKLERRHYTGWGRLSAKLLIGIRDKESHLTILDYLMNDDKHNRNLMQLINDSNLSFKSIIEKEQVSTADKDIQSIVADLAGSPAIKKGILQSLKIVDELVGIMGYPPQTIVVEMARENQTTGKGKNNSKPRFTSLEKAIKELGSQILKEHPTDNQGLKNDRLYLYYLQNGKDMYTGQELDIHNLSNYDIDHVVPQSFITDNSIDNRVLASSAANREKGDNVPSLEVVRKRKVYWEKLYQAKLMSKRKFDYLTKAERGGLTEADKARFIHRQLVETRQITKNVANILHQRFNCKKDESGNVIEQVRIVTLKAALVSQFRKQFQLYKVREVNDYHHAHDAYLNCVVANTLLKVYPQLEPEFVYGDYHQFDWFKANKATAKKQFYTNIMLFFAKKDRIIDENGEILWDKKYLDTIKKVLNYRQMNIVKKTEIQKGEFSNATANPKGNSSKLIPRKADWDPIKYGGFDGSNMAYAIVIEHEKRKKKTVIKKELIQINIMERTAFEKDQKEFLEGKGYRNPKVITKIPKYTLYECENGRRRMLGSANEAQKGNQMVLPNHLMTLLYHAKNCEASDGKSLAYIESHREMFAELLDSISEFASRYTLADANLEKINTIFEQNKSGDVKVIAQSFVNLLEFNAMGAPASFKYFETNIERKRYNNLKELLNATIIYQSITGLYEARKRLDD

SEQ ID NO: 176 - protein, 1082 aa, Neisseria lactamica
MAAFKPNPMNYILGLDIGIASVGWAMVEIDKEENPIRLIDLGVRVFERAEVPKTGDSLAMARRLARSVRRLTRRRAHRLLRARRLLKREGVLQDADFDENGLVKSLPNTPWQLRAAALDRKLTCLEWSAVLLHLIKHRGYLSQRKNEGETADKELGALLKGVADNAHALQTGDFRTPAELALNKFEKESGHIRNQRGDYSHTFSRKDLQAELNLLFEKQKEFSNPHVSDSLKEGIETLLMAQRPALSGDAVQKMLGHCTFEPAEPKAAKNTYTAERFIWLTKLNNLRILEQGSERPLTDTERATLMDEPYRKSKLTYAQARKLLGLEDTAFFKGLRYGKDNAEAPTLMEMKAYHAISRALEKEGLKDKKSPLNLSTELQDEIGTAFSLFKTDKDITGRLKDRVQPEILEALLKHISFDKFVQISLKALRRIVPLMEQGKRYDEACAEIYGDHYCKKNAEEKIYLPPIPADEIRNPVVLRALSQARKVINCVVRRYGSPARIHIETAREVGKSFKDRKEIEKRQEENRKDREKAAAKFREYFPNFVGEPKSKDILKLRLYEQQHGKCLYSGKEINLVRLNEKGYVEIDHALPFSRTWDDSFNNKVLVLGSENQNKGNQTPYEYFNGKDNSREWQEFKARVETSRFPRSKKQRILLQKFDEEGFKERNLNDTRYVNRFLCQFVADHILLTGKGKRRVFASNGQITNLLRGFWGLRKVRAENDRHHALDAVVVACSTVAMQQKITRFVRYKEMNAFDGKTIDKETGEVLHQKAHFPQPWEFFAQEVMIRVFGKPDGKPEFEEADTPEKLRTLLAEKLSSRPEAVHEYVTPLFVSRAPNRKMSGQGHMETVKSAKRLDEGISVLRVPLTQLKLKGLEKMVNREREPKLYDALKAQLETHKDNPAKAFAEPFYKYDKAGNRTQQVKAVRIEQVQKTGVWVRNHNGIADNATMVRVDVFEKGGKYYLVPIYSWQVAKGILPDRAVVAFKDEEDWTVMDDSFEFRFVLYANDLIKLTAKKNEFLGYFVSLNRATGAIDIRTHDTDSTKGKNGIFQSVGVKTALSFQKNQIDELGKEIRPCRLKKRPPVR

SEQ ID NO: 177 - protein, 1326 aa, Streptococcus pseudoporcinus
MLGTVLFDSGETAQARRLKRTNRRRYTRRRYRLCQLQNIFATEMVKVDDTFFQRLSESFFYYQDKAFDKHPIFGNSKEERAYHKTYPTIYHLRKDLADRDQKADLRLIYLALSHIIKFRGHFLIEGKLNSENTDVQKLFIALVTVYNLLFEEEPIAGETCDAKALLTAKTSKSKRLESLISEFPGQKKNGLFGNLLALALGLRPNFKSNFGLSEDAKLQITKDTYEEELDNLLAEIGDHYADLFLAAKNLSDAILLSDILTLSDENTRAPLSASMIKRYEEHQEDLALLKKLVKEQMPEKYWEIFSNAKKNGYAGYIEGKVSQEDFYRYIKPILSRLKGGDEFLAKIDRDDFLRKQRTFDNGSIPHQIHLKELHAILRRQEKYYPFLAEQKEKIEQLLCFRIPYYVGPLAKGGNSSFAWLKRRSDEPITPWNFKDVVDEEASAQAFIEGMTNYDTYLPEEKVLPKHSPLYEMFTVYNELTKVKYIAENMTKPLYLSAEQKEAIIDHLFKQTRKVTVKDLKEKYFSQIEGLENVDVTGVEGAFNASLGTYNDLLKIIKDKAFLDDEANAEILEEIVLILTLFQDEKLIEKRLAKYANLFEKSVLKKLRKRHYRGWGRLSRQLIDGMKDKASGKTILDFLKADDFANRNFIQLINDSSLDFEKLIDDAQKKAIKRESLTEAVANLAGSPAIKKGILQSLKVVDEIVKVMGHNPDNIVIEMSRENQTTAQGLKNARQRLKKIKEVHKKTGSRILEDNSERITNLTLQDNRLYLYLLQDGKDMYTGQDLDINNLSQYDIDHIIPQSFIKDNSIDNLVLTTQKANRGKSDNVPSIEVVRDMKDRVWRRQLANGAISRQKFDHLTKAERGGLADSDKARFLRRQLVETRQITKHVAQLLDSRFNSKSNQNKKLARNVKIITLKSKIVSDFRKDFGLYKLREVNNYHHAHDAYLNAVVGTALLKKYPKLEAEFVYGDYKHFDLVKLISKSDPSLGKATAKVFFYSNIMNFFKEELSLADGTLMKRPVIETNTETGEVVWDKVKDFKTIRKVLSYPQVNIVKKTEIQSGAFSKESVLSKGNSDKLIERKKGWDPKKYGGFDSPNTAYSIFVVAKVAKRKAQKLKTVKEIVGITIMEQAEYEKDNIAFLEKKGYQDIQEKLLIKLPKYSLFELENGRRRLLASANEFQKGNELALSGKYMKFLYLASRYDKLSSKIESEQQKKLFVEQHLHYFDEILDIVVKHATCYIKAENNLKKIISLYKKKEAYSINEQALNMLNLFIFTSLGAPSTFVFFDETIDRKRYTTSSDVLNGILIQQSITGLYETRIDLSRFGGD

SEQ ID NO: 178 - protein, 1150 aa, Enterococcus faecalis
MYSIGLDLGISSVGWSVIDERTGNVIDLGVRLFSAKNSEKNLERRTNRGGRRLIRRKTNRLKDAKKILAAVGFYEDKSLKNSCPYQLRVKGLTEPLSRGEIYKVTLHILKKRGISYLDEVDTEAAKESQDYKEQVRKNAQLLTKYTPGQIQLQRLKENNRVKTGINAQGNYQLNVFKVSAYANELATILKTQQAFYPNELTDDWIALFVQPGIAEEAGLIYRKRPYYHGPGNEANNSPYGRWSDFQKTGEPATNIFDKLIGKDFQGELRASGLSLSAQQYNLLNDLTNLKIDGEVPLSSEQKEYILTELMTKEFTRFGVNDVVKLLGVKKERLSGWRLDKKGKPEIHTLKGYRNWRKIFAEAGIDLATLPTETIDCLAKVLTLNTEREGIENTLAFELPELSESVKLLVLDRYKELSQSISTQSWHRFSLKTLHLLIPELMNATSEQNTLLEQFQLKSDVRKRYSEYKKLPTKDVLAEIYNPTVNKTVSQAFKVIDALLVKYGKEQIRYITIEMPRDDNEEDEKKRIKELHAKNSQRKNDSQSYFMQKSGWSQEKFQTTIQKNRRFLAKLLYYYEQDGICAYTGLPISPELLVSDSTEIDHIIPISISLDDSINNKVLVLSKANQVKGQQTPYDAWMDGSFKKINGKFSNWDDYQKWVESRHFSHKKENNLLETRNIFDSEQVEKFLARNLNDTRYASRLVLNTLQSFFTNQETKVRVVNGSFTHTLRKKWGADLDKTRETHHHHAVDATLCAVTSFVKVSRYHYAVKEETGEKVMREIDFETGEIVNEMSYWEFKKSKKYERKTYQVKWPNFREQLKPVNLHPRIKFSHQVDRKANRKLSDATIYSVREKTEVKTLKSGKQKITTDEYTIGKIKDIYTLDGWEAFKKKQDKLLMKDLDEKTYERLLSIAETTPDFQEVEEKNGKVKRVKRSPFAVYCEENDIPAIQKYAKKNNGPLIRSLKYYDGKLNKHINITKDSQGRPVEKTKNGRKVTLQSLKPYRYDIYQDLETKAYYTVQLYYSDLRFVEGKYGITEKEYMKKVAEQTKGQVVRFCFSLQKNDGLEIEWKDSQRYDVRFYNFQSANSINFKGLEQEMMPAENQFKQKPYNNGAINLNIAKYGKEGKKLRKFNTDILGKKHYLFYEKEPKNIIK

SEQ ID NO: 179 - protein, 1150 aa, Enterococcus faecalis
MYSIGLDLGVSSVGWSVIDERTGNVIDLGVRLFSAKNSEKNLERRTNRGGRRLIRRKTNRLKDAKKILAAVGFYEDKSLKNSCPYQLRVKGLTEPLSKGEIYKVTLHILKKRGISYLDEDDTEAAKESQDYKEQVRENAQLLTKYTPGQIQLQRLKENNRVKTGINAQGNYQLNVFKVSAYANELATILKTQQAFYPNELTDDWIALFVQPGIAEEAGLIYRKRPYYHGPGNEANNSPYGRWSDFKKTGQPATNIFDKLIGKDFQGELRASGLSLSAQQYNLLNDLTNLKIDGEIPLSPEQKEYILAELMTKEFTRFGINDVAKLLGVKKERLSGWRLDKKGKPEIHTLKGYRNWRKIFAESGIDLATLPTETIDCLAKVLTLNTEREGIENTLAFELPELAESVKLLVLDRYKELSQSVSTQAWHRFSLKTLHLLIPELMNATSEQNTLLEQFQLKSDVRKRYSEYKKLPTKDVLTEIYNPTVNKTVSQAFKVIDALLVKYGKEQIRYITIEMPRDDNEEDEKKRIKELHAKNSQRKNDSQSYFMQKSGWSQEKFQTTIQKNRRFLAKLLYYYEQDGICAYTGLSISPELLVSDSTEIDHIIPISISLDDSINNKVLVLSKANQVKGQQTPYDAWMDGSFKKINGKFSNWDDYQKWVESRHFSHKKENNLLETRNIFDSEQVEKFLARNLNDTRYASRLVLNTLQSFFANQETKVRVVNGSFTHTLRKKWGADLDKTRETHHHHAVDATLCAVTPFVKVSRYHYAVKEETGEKVMREIDFETGEIVDEMSYREFKKSKKYERKTYQVKWPNFREQLKPVNLHPRIKFSHQVDRKANRKLSDATIYSVREKTEVKTLKSGKQKITTDEYTIGKIKDIYTVDGWEAFKKKQDKLLMKDLDEKTYERLLSIAETTPDFQEVEEKNGKVKRVKRSPFAVYCEENDIPAIRKYAKNNNGPLIRSLKYYDGKLNKHINITKDSQGRPVEKTKNGRKVTLQSLKPYRYDIYQDLETKAYYTVQLYYSDLRFVEGKYGITEKEYMKKVAEQTKGQVVRFCFSLQKNDGLEIEWKDSQCYDVRFYNFQSANSINFKGLEQEMMPAENQFKQKPYNNGAINLNIAKYGKEGKKLRKFNTDILGKKHYLYYEKEPKNIIK

SEQ ID NO: 180 - protein, 1345 aa, Streptococcus anginosus
MDQKYSIGLDIGTNSVGWAVVTDDYKVPAKKMKVLGNTDKQSIKKNLLGALLFDSGETAEATRLKRTARRRYTRRRNRLRYLQEIFAEEMNKVDENFFQRLDDSFLVDEDKRGERHPIFGNIAAEVKYHDDFPTIYHLRKHLADISQKADLRLVYLALAHMIKFRGHFLIEGQLKAENTNVQALFKDFVEVYDKTVEESHLSEMTVDALSILTEKVSKSRRLENLIAHYPAEKKNTLFGNLIALSLGLQPNFKTNFQLSEDAKLQFSKDTYEEDLEGLLGEIGDEYADLFASAKNLYDAILLSGILTVDDNSTKAPLSASMVKRYEEHQKDLKKLKDFIKVNAPDQYNAIFKDKNKKGYAGYIENGVKQDEFYKYLKGILLQINGSGDFLDKIDREDFLRKQRTFDNGSIPHQIHLQEMHAILRRQEEHYPFLKENQDKIEKILTFRIPYYVGPLARKGSRFAWAEYKADEKITPWNFDDILDKEKSAEKFITRMTLNDLYLPEEKVLPKHSLLYETFTVYNELTKVKYVNEQGEAKFFDANMKQEIFDHVFKENRKVTKDKLLNYLNKEFEEFRIVNLTGLDKENKAFNSSLGTYHDLRKILDKSFLDDKANEKTIEDIIQTLTLFEDREMIRQRLQKYSDIFTKAQLKKLERRHYTGWGRLSYKLINGIRNKENKKTILDYLIDDGYANRNFMQLINDDALSFKEEIARAQIIGDVDDIANVVHDLPGSPAIKKGILQSVKIVDELVKVMGHNPANIIIEMARENQMTDKGRRNSQQRLKLLQDSLKNLDNPVNIKNVENQQLQNDRLFLYYIQNGKDMYTGETLDINNLSQYDIDHIIPQAFIKDNSLDNRVLTRSDKNRGKSDDVPSIEVVHEMKSFWSKLLSVKLITQRKFDNLTKAERGGLTEEDKAGFIKRQLVETRQITKHVAQILDERFNTEFDGNKRRIRNVKIITLKSNLVSNFRKEFELYKVREINDYHHAHDAYLNAVVGNALLLKYPQLEPEFVYGEYPKYNSYRSRKSATEKFLFYSNILRFFKKEDIQTNEDGEIAWNKEKHIKILRKVLSYPQVNIVKKTEEQTGGFSKESILPKGESDKLIPRKTKNSYWNPKKYGGFDSPVVAYSILVFADVEKGKSKKLRKVQDMVGITIMEKKRFEKHPVDFLEQRGYRNVRLEKIIKLPKYSLFELENKRRRLLASARELQKGNELVIPQRFTTLLYHSYQIEKNYEPEHREYVEKHKDEFKELLEYISVFSRKYVLADNNLTKIEMLFSKNKDAEVSSLAKSFISLLTFTAFGAPAAFNFFGENIDRKRYTSVTECLNATLIHQSITGLYETRIDLSKLGED

SEQ ID NO: 181 - protein, 849 aa, Listeria ivanovii
  misc_feature (780)..(780): Xaa can be any naturally occurring amino acid
LIDKNGTPQHITMIDKMRGKCTYFPEEVRIAKMSYTAELFGLLNDFNNIYFADPETGEKIGFTEADKKYFIDTFIHDQKGVKNITLKQIMKHKNIINETDIFGYRINTKNGTPIFTEFKGLKALKKALKEVDLPDEFYQNTEMMDEIANILSSEKSFTRREEQLKELFLAAFNDELEEAVKELINDITFKEFHSLSKKAIMVILPELWSTNQNQMQLFVQHKMDKSRLENLQNGTKIQFDDEAILSTIAKRAHRETIKIVDAVRAKYGELDYVIVEMAREKNSDEQKKVYNRAQKKQGDFEKEMCKLLGVSELKELRLNGKQHLALKFWKEQDGKCIYSGKPIALSDIVNNFNGLLEIDHIIPISISYDDSQQNKVLCLRSENQRKGQLSPYQYLIRGMGERSFDAFKAEVLSRHFGKKKQNYLLEMEDIANNDELRKHFINRNLVDTRYAMRTFSNTLKTFYTVNGIPTKVMPVNGAMTSALRKRAKLNKDRDAGHAHHAIDALIVAAIGRLPLIKQLAELRVNEEGEFADKITDKGLDDKTAFDDKTLKFLRNLLNYESKVKYSHKVDRKPNRSLSKQTLYSTREKDGEKYIIGKVKNIYTLDKAGYAALKKRIDKNPEDFLMAQHNPKTWEEIIKIMEVYSKADNPFKEFYDEHGFIMKDGKVPVKSLRYHDKKLGIHVPLTHKYENTRHDVVLLKRNSLRVDIYMNKEGVYKYQGVPYNWFNQKGDKYILDMEKYHNEIDGTRASFKNIDNTFEFQFSLYKNDVFSYMKKDKEGEXVSYTKLFRSDSSPRENRLEVENIDMRTSSQQMPTINPLKNLIKYNTDILGNTYPIQKEKFVTVFTLHSK

SEQ ID NO: 182 - protein, 1457 aa, Prevotella buccae
MKTILGLDLGTNSIGWAKVSVDDYGNYLHDIKLGSRIIPMSQDVLGNFDSGVTVSQTAQRTEFRSKRRLVQRNLQRRERLHRVLHVLDFLPAHYDAAIGWDRTEAVTYGKFLNHAEPKLAWEELGNGKRRFLFMDSFHEMVADFARCQPALVADGKKIPLDWTIYYLRKKALTQAITKEELAWILLNFNQKRGYYQLRGEEEEENPTKQEEYYELKVVSVEATDSRKGNDTWYNVHLENGWIYRRSSKISLDDWVGKVKQFIVTTEYEKDGATLKTDKEGYVKRSFRAPNENDWGLRKKRTETLLEMSGKTVGAFIYDHLLQEPADKIRGNFIRTIERHYYKAELEAILAEQCKYHIELRDKEMLEACARELYLNNLPHQRSLMKKDMTYLLLYDLIFYQRPLKSKKALIANCPYEYYEYVDKETGEIKRQNIKCIAKSNPYFQEFRLWQFVLNLRLFDRVEDKEVTANYLPTADDHARLFTYLNDRKEINQETLLKDYFKLKKVKIGNEKEYPIRWNYIEDKEKKYPCNETRYELLMALDRAGIEHKWLDDNNLEYRLWHLLYSVEVKSESETALRKLKNDDAFVNSFLKVKPFKKEYGAYSEKAIKRLLAVMRKGFLWNEQDICDETRKRIEIIIKGDVDEKVKERMGHAAYSFDRVSDFQGLPEWLACYVVYGRHSEAMDIQHWDSPERLMAYINNFKQYSLRNPIVEQCILETLRTVHDIWKETGQIDEIHVELGREMKSTSEERARRTQNVLRNENTNLRIKSLLIELKNDTDICNVHPYSPMQQEILRIYEEGALQELNREDEDFEEISKISQMSQPSGKELNRYKLWLEQKYRSPYTGKAISLAKLFTPAYQIEHVIPQSRYFDDSFTNKVICEAEVNTLKSNLLGYEFIKKHGGEIIHCTTLGDVRIFSESEYKAFVMDHYANNKSKKDKLLMEDIPQEFLSRQMNDSRYISKVVKTLLSNIVRMADESEATSKSVIVCTGGVTDRLKKDWGLNDVWNSIVYSRFERLNRLTGTEAFGHWENKDGKRVFQTSMPLELQRGFRKKRIDHRHHAMDALVIACASRNIVNYLNNESANNPKKREDLRRQLCDKNRVIRKPWETFTQDAYNALENVVVSFKNYVRVINKATNRYEHYDENGKKRFVQQKGSELWAIRKPMHKETYYGHVNLRRKELVTLQKALDDIPSICDKKLRDYISALVEKHFNKRQLLAHFKSTDYYWQKQYVNKVYVWTFSDDIKPLVATRKLLDTSFDAKRIGTITDTGIQKILRNYLEAKGGNATLAFTPEGIAEMNQNISKYNDGKPHQPILKVRITEPMGAKYRVGQTGNKMAKYVEAQSGTNLYFAIYEDSEGKRSYTTVPLDEVAERLKQRLSPVPEKDENDVPLKFYLSPNDLVYVPTEEELQLRECKLNKDRIYKMVSSTGNECHFIPYYVANVIYNKGGFNMQMHRPQS

SEQ ID NO: 183 - protein, 1330 aa, Enterococcus italicus
MKNDYTIGLDIGTNSVGYSVVTDDYKVISKKMNVFGNTEKKSIKKNFWGVRLFESGQTAQEARMKRTSRRRIARRKNRICYLQEIFQPEMNHLDNNFFYRLNESFLVADDAKYDKHPIFGTLDEEIHFHEQFPTIYHLRKYLADGDEKADLRLVYLAIAHIIKFRGNFLIEGELNTENNSVIELSKVFVQLYNQTLSELEGFQFIDESIDFSEVLTQQLSKSERADNVLKLFPDEKGTGIFAQFIKLIVGNQGNFKKVFQLEEDQKLQLSTDDYEENIENLLAIIGDEYGDIFVAAQNLYQAILLAGILTSTEKTRAKLSASMIQRYEEHAKDLKLLKRFVKEHIPDKYAEIFNDATKNGYAGYIDGKTKEEEFYKYLKTTLVQKSGYQYFIEKIEQENFLRKQRIYDNGVIPHQVHAEELRAILRKQEKYYSFLKENHEKIEQIFKVRIPYYVGPLAKHNEQSRFAWNIRKSDEPIRPWNMNDVVDENASAVAFIERMTIKDIYLNENVLPRHSLIYEKFTVFNELTKVLYADDRGVFQRFSAEEKEDIFEKLFKSERKVTKKKLENYLRIELSISSPSVKGIEEQFNANFGTYLDLKKFDELHPYLDDEKYQDTLEEVIKVLTVFEDRSMIQNQLEQLPLNLSTKTIKALSRRKYTGWGRLSARLIDGIHDKNSGKTILDYLIEDESDSYIVNRNFMQLINDDHLSFKKIIEDSQPYKEQQSAEEIVSELSGSPAIKKGILQSLKIVDELVAIMGYKPKNIVVEMARENQTTGRGKQNSKPRLKGIENGLKEFSDSVLKGSSIDNKQLQNDRLYLYYLQNGKDMYTGHELDIDHLSTYDIDHIIPQSFLTDNSIDNRVLTTSKSNRGKSDNVPSEEVVRKMDRFWRKLLNAKLISERKYTNLTKKELTESDKAGFLKRQLVETRQITKHVATILDSKFNEDSNNRDVQIITLKSALVSEFRKTFNLYKVREINDLHHAHDAYLNAVVALSLLRVYPQLKPEFVYGEYGKNSIHDQNKATIKKQFYSNITRYFASKDYIINDDGEILWNKQETIAQVIKTLGMHQVNVVKKVEIQKGGFSKESIQPKGESQKLIRRKQQWNTKKYGGFDSPVVAYAILLSFDKGKRKARSFKIVGITIQDRESFEGNPILYLSKKDYHNPKVEAILPKYSLFEFENGRRRMVASASETQKGNQLIIPGHLMELLYHSKKIINGKNSDSVSYIQNNKEKFREIFEYIVDFSSKYISADANLNKIEKIFENNFHKASEQEIAKSFINLLTFTAMGAPADFEFFGEKIPRKRYVSISEIIDAVFIHQSITGLYETRVRLTEV

SEQ ID NO: 184 - protein, 1123 aa, Mobiluncus curtisii
MFVYLNSPRGFGPATFLTDLPHFCIIFGNNDFMDNRKYHVGIDVGTNSVGFAAVEVGDSGSPIRFLNTMVVIHDSGVDPEQKKYAITRLASAGTARRTRRLYRTRRQRLRELDDFISNELGYPLVNLENFADPYEPWKVRADLATIKLPADELPEAMSIALRHMARHRGWRSPYQRVEALHLHAEISEEFSALKKRVMEKTGDVFSDDATPAEVLVDLMGRQKIRGADGMLSGKLRQSDNANELRKIASVQGIDDETLNRIIDRVFFSRSPKGKASERVGMDALPGQGSKPRALKAMPSFQKFRIVSVICNLRIKDSGDDNRPLSMEEKEQLIGYLMSSTTDDHVTWTDVAELLHVKRSNLQGTAKEGPDGERPYTRPPVNSAWSKIKDSKIKSLVALWKTGDVDVQSAIVEALSNASVLEDARPGADIVVAYLESLDDKELESLDKVGLPAGRASYSEDSLERLTERMLQDDCDLFEARKREFGVSDDWKPPADPIYAPVGNPGVDRVLKIVNRLLMAAEREWGAPTQINIEHVRSGFSSELMQREFERENERRRAQNEEAVKAILTEKGGNSHVSKYDIIRYYAVKRQNCQCLYCGTPITFSDCELDHIVPRKGVGSTNSRVNLAAACRSCNRDKSNLPFAVWAGKTSNFDVSIDGAVSRVKQWQRSQNEGAREFRAFQNEVISRLLKTTEDPEIDSRSLESVAWMARELHHRVEYYFQSKGAQTQVSVYRGAVTAQARKSSGLEDKVKMIGGGGKTRLDRRHHAMDAATIALMTPGISTTLSEKNNLRDAQKFTGQSETWKDYCGRTETAREHFAVWKSNMERLTDLFNDKLENDAIPVVQPLRLRLSDSKAHDDGIGKLDSKKLGSVWSLADIDRAATPQIWTALTRCDDFDPTKGLPENANRVIRAQGVKYESEDNIPVFPSNVAAIAVRDGYAEIGSTIHHARIYRIDDGKKIFYSMIRVFAVDLLKHQAEDLFTVKLPPSAISIRTCEDSLRRALSNGTAEYLGWLVPGDEIIVDTSDKAFHTGQIGDLLRNFPVNSFRLTGFPSNSRLRLKPVLLAGEGLRDDAEDSIKKILSGQGWRPAINVLFSKGKPRIVRRNSLGIERPSSNNGLPFSWEA

SEQ ID NO: 185 - protein, 1054 aa, Staphylococcus lugdunensis
MNQKFILGLDIGITSVGYGLIDYETKNIIDAGVRLFPEANVENNEGRRSKRGSRRLKRRRIHRLERVKKLLEDYNLLDQSQIPQSTNPYAIRVKGLSEALSKDELVIALLHIAKRRGIHKIDVIDSNDDVGNELSTKEQLNKNSKLLKDKFVCQIQLERMNEGQVRGEKNRFKTADIIKEIIQLLNVQKNFHQLDENFINKYIELVEMRREYFEGPGKGSPYGWEGDPKAWYETLMGHCTYFPDELRSVKYAYSADLFNALNDLNNLVIQRDGLSKLEYHEKYHIIENVFKQKKKPTLKQIANEINVNPEDIKGYRITKSGKPQFTEFKLYHDLKSVLFDQSILENEDVLDQIAEILTIYQDKDSIKSKLTELDILLNEEDKENIAQLTGYTGTHRLSLKCIRLVLEEQWYSSRNQMEIFTHLNIKPKKINLTAANKIPKAMIDEFILSPVVKRTFGQAINLINKIIEKYGVPEDIIIELARENNSKDKQKFINEMQKKNENTRKRINEIIGKYGNQNAKRLVEKIRLHDEQEGKCLYSLESIPLEDLLNNPNHYEVDHIIPRSVSFDNSYHNKVLVKQSENSKKSNLTPYQYFNSGKSKLSYNQFKQHILNLSKSQDRISKKKKEYLLEERDINKFEVQKEFINRNLVDTRYATRELTNYLKAYFSANNMNVKVKTINGSFTDYLRKVWKFKKERNHGYKHHAEDALIIANADFLFKENKKLKAVNSVLEKPEIESKQLDIQVDSEDNYSEMFIIPKQVQDIKDFRNFKYSHRVDKKPNRQLINDTLYSTRKKDNSTYIVQTIKDIYAKDNTTLKKQFDKSPEKFLMYQHDPRTFEKLEVIMKQYANEKNPLAKYHEETGEYLTKYSKKNNGPIVKSLKYIGNKLGSHLDVTHQFKSSTKKLVKLSIKPYRFDVYLTDKGYKFITISYLDVLKKDNYYYIPEQKYDKLKLGKAIDKNAKFIASFYKNDLIKLDGEIYKIIGVNSDTRNMIELDLPDIRYKEYCELNNIKGEPRIKKTIGKKVNSIEKLTTDVLGNVFTNTQYTKPQLLFKRGN

SEQ ID NO: 186 - protein, 586 aa, Pseudoramibacter alactolyticus
MTYYLGLDMGTGSVGWAATDKNYKLIRAKGKDLWGVRLFQTAKTAAERRSHRVARLRRQREKVRIGYLKTIFSDAINKVDPGFFQRLDDSFFYAEDKNINQPYALFADTGYTDVDYYRDYPTIFHLRSTLIHDTSPKDVRLVYLAVLNMFKHRGHFLASNLSENGVDDFGDIYQQWCKSVPKPVQISDPEAKTEKIENILSKAGISNTRRLEALLEVFGIKRRDAFAEVLKLWCGLKGNLSKIWSETDFSDLDNTKPALSFKDSNLDMVLSQLEEILPDEDYSWLMLTKQIYDWSLLSGMMKDASGKSYDYLSDARVASYQKHSEDLKTLKRFYHDNHLSAAYDQMFRVMGKDNYSAYAGSVQSKKEVVRRGASCGIEELYKRIKKDLKPVPDCETKQIILENIERGTFLPKQLTRDNGVIPNQIHVHELKAILKNAENYLPFLKEGSELTNSEKILQLFQFQIPYYVGPLYSDENNYAWVVRKEGGRVFPWNFAEKVDEKASAEGFISELVARCTYLDNEKVLPKASLLYEKFMVLNELNNLRINGERISVDIKQELYQNLFTRGKKVTLKKSEGLFGGQRIFCL

SEQ ID NO: 187 - protein, 1385 aa, Gemella morbillorum
MKNKTWYLGLGVGPTSIGWAATDSNYKLLRKNKKRLWGVRLFEEAKTAVDRRTFRAERRRLARRKWRISLLEELFAKEVSKNDPNFFLRLKESKYHFEDKSLMNEYILFNDKDYTDKDYYKEYPTIYHLRLSLTTEENPDIRKVYLAVHSMLKNRGHFLLQGQSFNDSNIDSVIKELLELETVKINFEVTDEVIHSLKKIALEKKNLSDKNNDVKKLYPKEKQLQEIFKLVFGGKTSLDKLYDIEEYKELDNSVKSISFKEKVYEEVRPDYEQILSNYIELLDLAKLVYDSIVLADIKKEGKTISESKVELYNKHKDDLANLKKLVKIDSKLSEDKKKEVYFTIFKEDKEKGTNYVNYTHRSQEGKSCSYEDFKKFLKKELEKLEDSPTKTTILEELDLETFLPLQRTKDNSVVPYQIHKEELVKILDNAAKYHSFLAEKDDSGYSTREKVVQLFEFRIPYYIGPLNAHHNTENGGYSWAIRKKGMESVPVTPWNFKDVIDESASAEAFVNNLKNKCAYLSGEDVLPKNSLLYSEYALLNELNALRYEGNRISVEARDVIVTKLFKEQGKKVTKKTIKELLKTEGFIDGKGEIVGIDNIVKNDLKSYRDFKKILADKFDKERVENIILWITLYGESRKLIKEKITKVYGDFYTVDEIEKMSRLTYKDWGILSRKLLTELVSEKLYNEETGECLNIIGAMRQGTILFMELLADKFDYMSQIKNHNKENKDDITEITPDILENLHASPAVKRSIWQTVRIVEELKTIIGCVPTKIFIETTKRNNAPYKVPTLNRNDLVTKYKTIREHEIFELEKELKNTLDFTLNKNRLINEEPSKLKATKLYLYYTQLGRCMYTGKKIDLGELFDNNNKYDIDHIYPQSKVKDGSFNNIVLVTKASNDMKADVFPLKSKFQTKENKIFWRFLKEKKLITEEKYNRLVRTEEFSNGELTGFITRQLVETSQAIKVISNVLRELNPETTICYSKAENVSSFRQSFGKIKEANRKAENNEKLIRVQEINDYYNAKDAYLSIVVGNVYDVKFTRNVHNFIKNNKDARRYSLNGLFYTDVKNANTIAWEMDKTVHVVEKTMNNNNILITRRTSEQKGALYDATLYKAKVAEKAKEGTYYPLKTTDSKIKDVGKYGGFTKIKIAYYSIFEYTLDGKKGKQKITRIVPIPIYISQNIKDDKALLEYAQTRLPGKDLKIKYRKLCIGSLVKINNFNYYIGGKTNNNFTFDSAVQVILDKDSESYIKELAKYLNWKKENKDGKLWESITEDKNIQLYDSLVKKMNTGIFIRKTPNKYTELLTLEVKNKFINIDIDEQVKLLLEILNLLTNKKFTSKLNEIGITASRGVCSFNLSNQSQFSIIEQSVTGVYEKEKLIIEKKKEGIL

SEQ ID NO: 188 - protein, 1029 aa, Alicycliphilus denitrificans
MRSLRYRLALDLGSTSLGWALFRLDACNRPTAVIKAGVRIFSDGRNPKDGSSLAVTRRAARAMRRRRDRLLKRKTRMQAKLVEHGFFPADAGKRKALEQLNPYALRAKGLQEALLPGEFARALFHINQRRGFKSNRKTDKKDNDSGVLKKAIGQLRQQMAEQGSRTVGEYLWTRLQQGQGVRARYREKPYTTEEGKKRIDKSYDLYIDRAMIEQEFDALWAAQAAFNPTLFHEAARADLKDTLLHQRPLRPVKPGRCTLLPEEERAPLALPSTQRFRIHQEVNHLRLLDENLREVALTLAQRDAVVTALETKAKLSFEQIRKLLKLSGSVQFNLEDAKRTELKGNATSAALARKELFGAAWSGFDEALQDEIVWQLVTEEGEGALIAWLQTHTGVDEARAQAIVDVSLPEGYGNLSRKALARIVPALRAAVITYDKAVQAAGFDHHSQLGFEYDASEVEDLVHPETGEIRSVFKQLPYYGKALQRHVAFGSGKPEDPDEKRYGKIANPTVHIGLNQVRMVVNALIRRYGRPTEVVIELARDLKQSREQKVEAQRRQADNQRRNARIRRSIAEVLGIGEERVRGSDIQKWICWEELSFDAADRRCPYSGVQISAAMLLSDEVEVEHILPFSKTLDDSLNNRTVAMRQANRIKRNRTPWDARAEFEAQGWSYEDILQRAERMPLRKRYRFAPDGYERWLGDDKDFLARALNDTRYLSRVAAEYLRLVCPGTRVIPGQLTALLRGKFGLNDVLGLDGEKNRNDHRHHAVDACVIGVTDQGLMQRFATASAQARGDGLTRLVDGMPMPWPTYRDHVERAVRHIWVSHRPDHGFEGAMMEETSYGIRKDGSIKQRRKADGSAGREISNLIRIHEATQPLRHGVSADGQPLAYKGYVGGSNYCIEITVNDKGKWEGEVISTFRAYGVVRAGGMGRLRNPHEGQNGRKLIMRLVIGDSVRLEVDGAERTMRIVKISGSNGQIFMAPIHEANVDARNTDKQDAFTYTSKYAGSLQKAKTRRVTISPIGEVRDPGFKG

SEQ ID NO: 189 - protein, 1422 aa, Sutterella wadsworthensis
MTQSERRFSCSIGIDMGAKYTGVFYALFDREELPTNLNSKAMTLVMPETGPRYVQAQRTAVRHRLRGQKRYTLARKLAFLVVDDMIKKQEKRLTDEEWKRGREALSGLLKRRGYSRPNADGEDLTPLENVRADVFAAHPAFSTYFSEVRSLAEQWEEFTANISNVEKFLGDPNIPADKEFIEFAVAEGLIDKTEKKAYQSALSTLRANANVLTGLRQMGHKPRSEYFKAIEADLKKDSRLAKINEAFGGAERLARLLGNLSNLQLRAERWYFNAPDIMKDRGWEPDRFKKTLVRAFKFFHPAKDQNKQHLELIKQIENSEDIIETLCTLDPNRTIPPYEDQNNRRPPLDQTLLLSPEKLTRQYGEIWKTWSARLTSAEPTLAPAAEILERSTDRKSRVAVNGHEPLPTLAYQLSYALQRAFDRSKALDPYALRALAAGSKSNKLTSARTALENCIGGQNVKTFLDCARRYYREADDAKVGLWFDNADGLLERSDLHPPMKKKILPLLVANILQTDETTGQKFLDEIWRKQIKGRETVASRCARIETVRKSFGGGFNIAYNTAQYREVNKLPRNAQDKELLTIRDRVAETADFIAANLGLSDEQKRKFANPFSLAQFYTLIETEVSGFSATTLAVHLENAWRMTIKDAVINGETVRAAQCSRLPAETARPFDGLVRRLVDRQAWEIAKRVSTDIQSKVDFSNGIVDVSIFVEENKFEFSASVADLKKNKRVKDKMLSEAEKLETRWLIKNERIKKASRGTCPYTGDRLAEGGEIDHILPRSLIKDARGIVFNAEPNLIYASSRGNQLKKNQRYSLSDLKANYRNEIFKTSNIAAITAEIEDVVTKLQQTHRLKFFDLLNEHEQDCVRHALFLDDGSEARDAVLELLATQRRTRVNGTQIWMIKNLANKIREELQNWCKTTNNRLHFQAAATNVSDAKNLRLKLAQNQPDFEKPDIQPIASHSIDALCSFAVGSADAERDQNGFDYLDGKTVLGLYPQSCEVIHLQAKPQEEKSHFDSVAIFKEGIYAEQFLPIFTLNEKIWIGYETLNAKGERCGAIEVSGKQPKELLEMLAPFFNKPVGDLSAHATYRILKKPAYEFLAKAALQPLSAEEKRLAALLDALRYCTSRKSLMSLFMAANGKSLKKREDVLKPKLFQLKVELKGEKSFKLNGSLTLPVKQDWLRICDSPELADAFGKPCSADELTSKLARIWKRPVMRDLAHAPVRREFSLPAIDNPSGGFRIRRTNLFGNELYQVHAINAKKYRGFASAGSNVDWSKGILFNELQHENLTECGGRFITSADVTPMSEWRKVVAEDNLSIWIAPGTEGRRYVRVETTFIQASHWFEQSVENWAITSPLSLPASFKVDKPAEFQKAVGTELSELLGQPRSEIFIENVGNAKHIRFWYIVVSSNKKMNESYNNVSKS

SEQ ID NO: 190 - protein, 1132 aa, Nitratifractor salsuginis
MKKILGVDLGITSFGYAILQETGKDLYRCLDNSVVMRNNPYDEKSGESSQSIRSTQKSMRRLIEKRKKRIRCVAQTMERYGILDYSETMKINDPKNNPIKNRWQLRAVDAWKRPLSPQELFAIFAHMAKHRGYKSIATEDLIYELELELGLNDPEKESEKKADERRQVYNALRHLEELRKKYGGETIAQTIHRAVEAGDLRSYRNHDDYEKMIRREDIEEEIEKVLLRQAELGALGLPEEQVSELIDELKACITDQEMPTIDESLFGKCTFYKDELAAPAYSYLYDLYRLYKKLADLNIDGYEVTQEDREKVIEWVEKKIAQGKNLKKITHKDLRKILGLAPEQKIFGVEDERIVKGKKEPRTFVPFFFLADIAKFKELFASIQKHPDALQIFRELAEILQRSKTPQEALDRLRALMAGKGIDTDDRELLELFKNKRSGTRELSHRYILEALPLFLEGYDEKEVQRILGFDDREDYSRYPKSLRHLHLREGNLFEKEENPINNHAVKSLASWALGLIADLSWRYGPFDEIILETTRDALPEKIRKEIDKAMREREKALDKIIGKYKKEFPSIDKRLARKIQLWERQKGLDLYSGKVINLSQLLDGSADIEHIVPQSLGGLSTDYNTIVTLKSVNAAKGNRLPGDWLAGNPDYRERIGMLSEKGLIDWKKRKNLLAQSLDEIYTENTHSKGIRATSYLEALVAQVLKRYYPFPDPELRKNGIGVRMIPGKVTSKTRSLLGIKSKSRETNFHHAEDALILSTLTRGWQNRLHRMLRDNYGKSEAELKELWKKYMPHIEGLTLADYIDEAFRRFMSKGEESLFYRDMFDTIRSISYWVDKKPLSASSHKETVYSSRHEVPTLRKNILEAFDSLNVIKDRHKLTTEEFMKRYDKEIRQKLWLHRIGNTNDESYRAVEERATQIAQILTRYQLMDAQNDKEIDEKFQQALKELITSPIEVTGKLLRKMRFVYDKLNAMQIDRGLVETDKNMLGIHISKGPNEKLIFRRMDVNNAHELQKERSGILCYLNEMLFIFNKKGLIHYGCLRSYLEKGQGSKYIALFNPRFPANPKAQPSKFTSDSKIKQVGIGSATGIIKAHLDLDGHVRSYEVFGTLPEGSIEWFKEESGYGRVEDDPHH

SEQ ID NO: 191 - protein, 1327 aa, Solobacterium moorei
MEGQMKNNGNNLQQGNYYLGLDVGTSSVGWAVTDTDYNVLKFRGKSMWGARLFDEASTAEERRTHRGNRRRLARRKYRLLLLEQLFEKEIRKIDDNFFVRLHESNLWADDKSKPSKFLLFNDTNFTDKDYLKKYPTIYHLRSDLIHNSTEHDIRLVFLALHHLIKYRGHFIYDNSANGDVKTLDEAVSDFEEYLNENDIEFNIENKKEFINVLSDKHLTKKEKKISLKKLYGDITDSENINISVLIEMLSGSSISLSNLFKDIEFDGKQNLSLDSDIEETLNDVVDILGDNIDLLIHAKEVYDIAVLTSSLGKHKYLCDAKVELFEKNKKDLMILKKYIKKNHPEDYKKIFSSPTEKKNYAAYSQTNSKNVCSQEEFCLFIKPYIRDMVKSENEDEVRIAKEVEDKSFLTKLKGTNNSVVPYQIHERELNQILKNIVAYLPFMNDEQEDISVVDKIKLIFKFKIPYYVGPLNTKSTRSWVYRSDEKIYPWNFSNVIDLDKTAHEFMNRLIGRCTYTNDPVLPMDSLLYSKYNVLNEINPIKVNGKAIPVEVKQAIYTDLFENSKKKVTRKSIYIYLLKNGYIEKEDIVSGIDIEIKSKLKSHHDFTQIVQENKCTPEEIERIIKGILVYSDDKSMLRRWLKNNIKGLSENDVKYLAKLNYKEWGRLSKTLLTDIYTINPEDGEACSILDIMWNTNATLMEILSNEKYQFKQNIENYKAENYDEKQNLHEELDDMYISPAARRSIWQALRIVDEIVDIKKSAPKKIFIEMAREKKSAMKKKRTESRKDTLLELYKSCKSQADGFYDEELFEKLSNESNSRLRRDQLYLYYTQMGRSMYTGKRIDFDKLINDKNTYDIDHIYPRSKIKDDSITNRVLVEKDINGEKTDIYPISEDIRQKMQPFWKILKEKGLINEEKYKRLTRNYELTDEELSSFVARQLVETQQSTKALATLLKKEYPSAKIVYSKAGNVSEFRNRKDKELPKFREINDLHHAKDAYLNIVVGNVYDTKFTEKFFNNIRNENYSLKRVFDFSVPGAWDAKGSTFNTIKKYMAKNNPIIAFAPYEVKGELFDQQIVPKGKGQFPIKQGKDIEKYGGYNKLSSAFLFAVEYKGKKARERSLETVYIKDVELYLQDPIKYCESVLGLKEPQIIKPKILMGSLFSINNKKLVVTGRSGKQYVCHHIYQLSINDEDSQYLKNIAKYLQEEPDGNIERQNILNITSVNNIKLFDVLCTKFNSNTYEIILNSLKNDVNEGREKFSELDILEQCNILLQLLKAFKCNRESSNLEKLNNKKQAGVIVIPHLFTKCSVFKVIHQSITGLFEKEMDLLK

SEQ ID NO: 192 - protein, 738 aa, Treponema phagedenis
MLQELFAKEIAKIDEGFFRRLDESAFYLEDKSLKQKYSLFNDDNFTDKDYYKKFPTIHHLIKALINDETHVDIRLLYLACHTIIKNRGHFLFEGKEFNTESRFDDAINELFSYLRQDMEIDFAFEDKIADIKEILENKKIGMRDKQNALNKKLSIAPKDKQKKEIIKLIVGASFNLKTLFNDEKYSSEKESYSFAKSNYEEKEAVLESLLGDGFGLILRAKAVYDSSVLSEILGNETYLSFAKVKIYDKHKEDLAKLKKVIKTYHADEFKKVFAEANIQGNYCSYVGSCKKNGKKVPIEKRADKDAFYDFLKKILKDEKAKNSDADYAFILNEIELKTFLPKQVSKKNANIPYQLRRMELEKIVNNAEKYFSFLSEKDEYGTVKEKIIQLLTFKRPYYIGIIQDTHKEKFPDRCWVVKKENAKNEKITPWNFYDHIDEDKTAEAFITSRTNKCTYLIGEDVLPRNSLLYMEYTVLNELNNLKVSVDGVNIFDVKLKKKIYEQVFKQRKEVSKKTIADFLKKEGICKKENDVVITGIDEKCTTSLKLYIDIKKIIGKRIEEEPTKNALEDIILWASIYDEGEGRKILEAKIQSVYPDVFTQDELNKILKLKISGWGRFSRKFLESIVASFPGFTDTINIITAMRETNFNLMELLGDAYGFSKGIEKFNSKFNDDKKVFSYDKLVKDLYLSPSVKRMLWRALVIVKEVKSIMGKDPKKYLLKWQEEKKLKREGLPPAMQV

SEQ ID NO: 193 - protein, 1377 aa, Streptococcus equinus
MEKTYSIGLDIGTNSVGWAVITDDYKVPAKKMKVLGNTDKKYIKKNLLGALLFDSGETAEATRLKRAARRRYTRRKNRLRYLQEIFAKEMAKVDESFFQRLEESFLTDDDKTFDSHPIFGNKAEEDTYHQEFPTIYHLRKHLADSPEKVDLRLVYLALAHMIKFRGHFLIEGQLNAENTDVQKIFADFVGVYDRTFDDSHLSEITVDAASILTEKISKSRRLENLIKQYPTEKKNTLFGNLVALALGLQPNFKTNFKLSEDAKLQFSKDTYDEDLEELLGKIGDDYADLFTAAKNLYDAILLSGILTVDDNSTKAPLSASMIKRYEEHHEDLEKLKTFIKVNNFDKYHEIFKDKSKNGYAGYIENGVKQDIFYKHLKSIISEKNGGQYFLDKIEREDFLRKQRTFDNGSIPYQIHLQEMRTILRRQGEYYPFLKENQAKIEKILTFRIPYYVGPLARKNSRFAWAKYHSDEPITPWNFDEVVDKEKSAEKFITRMTLNDLYLPEEKVLPKHSYVYETFAVYNELTKIKYVNEQGKSFFFDANMKQEIFDHVFKENRKVTKAKLLSYLNNEFEEFRINDLIGLDKDSKSFNASLGTYHDLKKILDKSFLDDKTNEQIIEDIVLTLTLFEDRDMIHERLQKYSDIFTSQQLKKLERRHYTGWGRLSYKLINGIRNKENNKTILDFLIDDGDANRNFMQLINDDSLSFKTTIQEAQVVGDVDDIEAVVHDLPGSPAIKKGILQSVKIVDELVKVMGHNPQNIVIEMARENQITGYGRNRSNQRLKRLQDSLKEFGSDILSKKKPSYVDSKVENSHLQNDRLFLYYIQNGKDMYTGEELDIDHLSDYDIDHIIPQAFIKDNSIDNRVLTSSAKNRGKSDDVPSIEIVRNRKSYWYKLYKSGLISKRKFDNLTKAERGGLTETDKAGFIKRQLVETRQITKHVAQILDARFNTKCDENDKVIRDVKVITLKSSLVSQFRKEFKFYKVREINDYHHAHDAYLNAVVGTALLKKYPKLAPEFVYGEYKKYDVRKLVAKSSDNHSELGKATAKYFFYSNLMNFFKTEVKYADGRVFERPDIETNADGEVVWNKQRDFNIVRKVLSYPQVNIVKKVEVQTGGFSKESILPKGDSDKLIPRKTKKLQWETQKYGGFDSPTVAYSVLVVADVEKGKTRKLKTVKELVGISIMERSSFEENPVSFLEKKGYHNVQEDKLIKLPKYSLFEFEGGRRRLLASATELQKGNEVVLPQYMVNLLYHSQHVNNSHKPEHLNYVKQHKDEFKDIFNLIISIARINILKPKVVDNLINEFTEYGQEDISSLSESFINLLKFISFGAPGAFKFLKLDVKQSNLRYKSTTEALSATLIHQSVTGLYETRIDLSKLGEE

SEQ ID NO: 194 - protein, 1128 aa, Streptococcus vestibularis
MSDLVLGLDIGIGSVGVGILNKVTGEIIHKNSRIFPAAQAENNVERRTNRQGRRLTRRKKHRRVRLNHLFEESGLITDFTKVSINLNPYQLRVKGLIDELSNEELFIALKNMVKHRGISYLDDASDDGNSSVGDYAQIVKENSKQLETKTPGQIQLERYQKYGQLRGDFTVEEDGKKHRLINVFPTSAYRSEALRILQTQKEFNPQITDEFINRYLEILTGKRKYYHGPGNEKSRTDYGRYTTKKDSENEYITLDNIFGILIGKCTFYPEEYRAAKASYTAQEFNLLNDLNNLTVPTETKKLSEEQKNQIINYVKNEKAMGPAKLFKYIAKLLSCDVADIKGYRIDKSDKAEIHTFEAYRKMKTLETIDFEKMSRDQLDKLAYVLTLNTEREGIQEALDHEFADGNFSQEQIDELVQFRKANSSIFGKGWHNFSVKLMMELIPELYATSEEQMTILTRLGKQKTTSSSNKTKYIDEKLLTEEIYNPVVAKSVRQAIKIVNAAIKEYGDFDNIVIEMARETNEDDEKKAIQKIQKANKDEKDAAMLKAANQYNGRAELPHSVFHGHKQLATKIRLWHQQGERCLYTGKTISIHDLINNPNQFEIDHILPLSITFDDSLANKVLVYATANQEKGQRTPYQALDSMDDAWSFRELKAFVRESKSLSNKKKEYLLTEEDISRFDVRKKFIERNLVDTRYASRVVLNALQEHFRAHKTDTKVSVVRGQFTSQLRRHWGIEKTRDTYHHHAVDALIIAASSQLNLWKKQKNTLVNYSENQLLDIETGELISDDEYKESVFKAPYQHFVDTLKSKEFEDSILFSYQVDSKFNRKISDATIYATRQAKVGKDKKDETYVLGKIKDIYSQTGYDAFIKIYQKDKSKFLMYRHDPQTFEKVIEPILENYPNKEMNEKGKEVPCNPFLKYKEEHGDYIRKYSKKGNGPEIKSLKYYDSKLGNHIDITPKDSNNKVVLQSVSPWRADVYFNKTTGKYEILGLKYADLQFEKGTGTYKISQEKYNVIKKKEGVDSDSEFKFTLYKNDLLLIKDTETKEQQLFRFLSRTKPNVKHYVELKPYDKQKFEGNESLINVLGAVAKGGQCQKGINKPNISIYKVRTDVLGNQHIIKNEGDKPKLDF

SEQ ID NO: 195 - protein, 1080 aa, Methylocystis sp.
MRVLGLDGGIASIGWALIEIFEDHEPSDGRIIDTGAWMFDAPEEKSQTGTKLKSELRRIFRGQRRVIRRRRQRMNEVRRILHRHGLLSSDNRDALKQPGLDPWKIRAEGIDRLLSPIEFAVALGHIARHRGFKSNSKGAKTSDLDAESSRMKKAVGETREKLARFGSPAKLLVEDEGFVLRQTKLKSGALETVRRFRNRDGDYSRSLLRDDLAAEVRALFRAQARLQSTFAKVELEAEFTQAAFFQRPLQDSERLVGPCPFEPAEKRSPKRGYSFELFRFLSRLNHLTLREGSEERTLTVEELRTAAADFGGVAKFTFSTLRKRLALPDIAIFVGIKADDEKKLDVVARSGEAATGTARLRRVVIDALGELAWGALISAPERLDKITEIITFRSDLDRIRAGLIEAGFDTPLIEAIVRAAADGKLDAFTGVGHISAKAARNIIPGLMRGMTYDKACAAAGYDHTASRERDAFDVGMHGKEALKKILQEERISRELVGSPSARKALIEAVKQVKAIIEKYGVPDRIHVELARDVGKSIEERRDIHFGIEKRSRQKDKLRELFGKEVGHLPQDGERGKEELLRFELWNEQMGRCLYTDEYINPKQLVASDNSVQVDHILPWSRFGDDSYLNKTLCTAKANQDKKGRTPYEWFRADKPEAEWDAFVARVESIQFMKGLKKRNYKLKNAEEAAEKFRSRNLNDTRWTCRLLAEALKQLYPKGEKDKDGKERRRVFTRPGALTNRLRRAWSLQRRKKSEKGERIADDRHHALDAIIVAATTESLLIRATREVQDIERKGLHYDLTKNITQPWPGFADEALDAVEKVFVARAERRRARGKAHDATIRHIAVRDDEAKVYERKKVGDIKLGDLIRVKDAERNAPLIENLRKWIEAGSPRDNPPLSPKGDPVSKVRLVTKNKVNITLDTGNPERLATVDRGEMARVDVFRKANRKGKYEYYLVPIYPHEIATMETPPMRAVQGGGDDDKWPEIDSTFEFLWSINQLSLLELTKPDGEVIRSYFRSLDRNTGALTVSGIANSTATRKGIGTRTLIDFKKLHVDRLGQIFEVERELRTWRGETWRGKDCI

SEQ ID NO: 196 - protein, 1087 aa, Phascolarctobacterium succinatutens
MLRMKYAIGLDIGIASVGYAVLALDHEENPWGIIRLGSRIFDVAENPKDGASLALPRREARSVRRRLRRHHHRLERIKNLLINTEFITKDELLHLYDGNLSDVYELRVKALDYSVTNAELTRILLHLAQRRGFKSNRKSDANDKEAGQLLEAVSANAKRMQENHYRTVGEMFYKDDLFSKYKRNKGGTYLTTVHRDMIAAEARTILEKQFALGNNICTQDFIDKYLSILLSQRQFDEGPGEPSPYAGNQIANMIGKCTFEPNEYRAAKASYSFERFNLLQKVNHLRLLLEGKSIALDNEQRKKIIALAHDKADLRYSHIRKALGLDEKVLFNTITYNDDVSVIEKKTKFNFLQAYHQIKKVLAEDMQKLTTEQLDNIGQILSTYKSDNKRTEELSALGLEKKIIDALLGINGLSKFAHLSLKALRKINPYLEEGKIYNEACTAAGYDFKAHANTQKTELLPAYKEEMDDITSPVARRAIAQSIKVINAIIREQKGSPLYINIELAREMAKGFDERTQIDKANKENQAKNERIMERIRTEFHKANPTGMDLIKLKLWEEQDGRSPYSQKAISINRLFEPGYVDIDHIVPYSISFDDSFKNKVLVFSDENRDKGNRLPIAYLQSKFGAKAAENFMIWVQSNIKDYKKRQKLLKREITEEDINKFKERNLQDTKTISRFLYNYINDYLLFAPSDTGKKKRVTAVNGTITAYLRKRWGINKIRANGDKHHAVDAVVIACTTDKMIKDLSSFSRYHELEYTHTDTESFLVNSLTGEILKRFPYPWEDFRPELMARLSDNPADALRKLNLIFYHGIDLSTIKPIFVSRMPRHKVTGAAHKATIKSARCLDNGIVICKTSLQNLKLDKEGEIANYYAPESDTILYNALKERLRSYDNKPAKAFAEPFYKPKADGTPGPLVKKVKVYEKSTLNVAVQQNTAVADNDSMVRVDVFHVKGNGYYLVPIYIADTLKKELPNKAIVAYKPYADWPVMDDSNFIFSLYPNDLIKFEHKNSVKFAKVNKESTLNDFYSTKSEIVYFKGCNINTGAITIINHENTYVVSSLGVKTLPSLEKYQADVLGNYTKVKKEVRKPFR

SEQ ID NO: 197 - protein, 1375 aa, Lactobacillus ruminis
MRKNQEPYNIGLDIGTSSIGWSIMNDNFDLMRVKGKKGIGVRLYNEGQSAAERRMHRTARRRYGRRKWRLRLLEDFFDEHMAEVDDTFFARLKDSNISPKDDKKYRKSLLFPKSKGVTYQDDGEFYKKYPTMYHLRYALMTEHRKFDLREIYLAFHHMVKYRGNFLYDTSVDSFEAKNLDIKGKFDEINDLLSSYTDFYVDNSNAALVESILLEKNTTRKDKSKKIAKLLHVEDKEKGKNKKAKDLATQISNAVLGLKCNFHLIFELQQKYSFDLCSEKTEENIAKLSEVLDENQKMLLMILKEVQDQVMLNAFVPSGMSLSEAMMQKYDDYGEQLKIYHELEHSVSDDSAAKLRGAYRDYNDNIIKRIDGDNKKDTFYKRVKNILTKISKEYVDQDVLESCGKLKKLIDENKLFIRQRTAANGVLPHQLHQIEMRKIIDNQKEYYPWLAEPNPNEKRRVYSKYKVEELIAFRIPYYVGPLVDPNNADKNKEARFSWMVRKKDGEITPWNFYDKVDWAESANNFIERMKSKDTYLLGEDVVPKESMLYQKYEVLNELNNLRINDSGLSDSFEDVKLKQAIYNDLFKKQKIVKITDLQNYLVQNHKYLVKPKISGLADENRFLSSLSTYSDLKTIFGDKVDDRTYFNDFEKMVEYSTVFEDGHDYNQKLDEYTWLTKEEKYKIGKKRYRGWGKLSKKLLTGLRDKNNHTIMDNLWETNRNFMQIQTADEFSKQIAEENERHLKGSVSDAINDMYTSPANKKAIRQVLRVVDDIQKAMGYAPSSISLEFAREDGPSVRTVSRANRMKSIYEKYASEVSEEVMKDLDGVIKDKKGLNDRLYLYFEQQGKDMYSGHPLDFDKVISGQEYDIDHILPQAVIKDDSLDNRVLTTKALNNDVKSKGVPCRMFNGMHSFWKNLYDKGFISRRKFNNLTTNPENIDKYKMKGFVNRQLVETRQIIKLVANVLNDKYQNDDVDIIEVRAELTHDVRKHFKFYKNRNVNDYHHAFDAYLTSFIGHYLFKKYPNLRPLFDYNDFMKVSDNVFKQLRGNNFLGEFLNKTGDIISTDGNFVLNKEEMINKLNKAYAFKKILVTKEVGQRTGAMFNETRYPAPNSRKAALKYRRMPKPDSLISVKDYKNTDIYGGYSGKNDAYMVIVDMGKQYMVVGVPVRYTEKLDKLRIKHSELYRDELRKVLSRDKTLLDSKGNVKRFDIVLDRVLYGQLIEDGNELFTLGSSKYKRNFRQLFLDKQCIEILDSSATPQPTDEELIWVYDQILDKVDKYFELYDINRQRETLRKGRAAFCSLPNISMKKDDVTKKKILNEILVALHANESESNCEKIGKKVFGRLQVPGGIKLSKEAKLIYQSPTGLFERVVYLKDL

SEQ ID NO: 198 - protein, 1391 aa, Prevotella oralis
MKKILGLDLGTTSIGWALVNEKENNEELSSIIRLGVRVNPLTVDEKSNFEKGKDITTNADRTKCRSARRNLQRFKLRREALADCLKRHGLMTDETPLCETNNSIIFKTYSNRAKAVCEKIALDDFVRVLFMINKKRGYKSSRKLNTDDEGTLVDGMDVAKLLYNEQITPGEYLLRLFKKGKKTRPDFYLSDLKAELERIWDFQRTFYPEILCNALKEDLKGKSRTQSSAIFYAKYKVSTAKIAGKDKRLQELTWRTDALRKQLTIDEVAYVICSINGEVNGSSQRLSMISDRSKLLYFNHQTIGQYLMQRLEENPNAGLKNIIFYRQDYEDEFNDIWNSQATYHKELTPELKKEVKDIIFYQRGLKSCKWLINYCELEHEEIEVKTPEGKLRKITIGSKTCPKSSPLFQEFKIWQVLNNLQVSPLNSRRKAKRKKDEEPSLFSDEDMNTACRYLNEEEKLTLFKELSIKKELKKKDALKLLFENYKELDLNYKVISGNVTMANLYRAFQDIISLTGNGEFDFQAMPAEEAEKTVEEIFGGLGYKTAFLHFDASLHDKEFERQPAYRLWHLLYSYAGDQSKTGIEALVKRIQELCGFEPEYARILANISFIPDYGNLSSKAMRKILPYMQDGYEYSEACSKAGYRHSASSLTKEEINKKNYKTHLDEIKRNSLRNPIVEKILNQMVNVVNSVIDTYSNIDEIRIEMARELKKSKPEREDMSFAISKATKETERIKGILEQEFKIQHVTRNDIIRYRLYEELKPNGYKTLYSNTYIPREDLFSKKFDIEHIIPKARLFDDSYSNKTLELRDINIEKGNQTAYDFVLSKYGEEGLYKYEQRVEEFKKNNEQAGTKCRKLLMREADIPSDFLNRDLNDSQYIAKKAHELLREIVPTVTATTGSITNRLREDWKLVNVMKELNWEKYDKLGLTEEYKDKDGNTVRHIKDWTKRNDHRHHAMDALTIAFTKPSFIQYLNNLNARSNRGGSIYGIEQKELERENNKLVFIPPIDPKIFRKQAKEHLSNILISIKAKNKVVTKNVNKTKSKSGTNRKVQLTPRGQLHLETVYGKIRTYKTEEIKVGTKLTEELIAKVADKKIREALMQRLSEYGGNIKKAFQNISKHPIWLNGSHTKHVPEKVKIVFFEDVFTIRKAITPDIKIDKVIDSKIRRILQERLNEFGGEASKAFSNLDENPIWFNRDKGIAIKSVKIRGIAKGTAIRVKKDIHGKTIIGNNGYPVANDYVNTGNNHHVAIFRDKDGNLQEHIVSFYEATARAIQNLPIVDRNYNSEKDWKFLFSMKQNEYFVFPNPNTGFNPSEISLKDEKNYALISPNLFRVQKLSHYYYVFRHHLETNVDTNLQLKDITWKRITAVNNLTGAVKVRIDHLGRIVDVGEYK

SEQ ID NO: 199 - protein, 1167 aa, Streptococcus sanguinis
MLFGLKTKFKDCFELEEEPDLNFSKENYDDNLEKLLGELGEDFSDVFDKLKILRDTILLSGMLTYTGATHARFSATMVERYEEHRKDLQRFKSFIKQNLSEQDYLDIFGRKTQNGFDVDKETKGYVGYITNKMVLTNPQKQKTIQQNFYDYISGKITGIEGSEYFLNKISDRTFLRKLRTSDNGAIPNQIHAYELEKIIERQGKDYPFLLENKDKLLSILTFKIPYYVGPLAKGNNSRFAWIKRANSSDILDDNDEDTRNGKIRPWNYHKLINMDETRDAFITNLIGNDTILLNEKVLPKRSLIYEEVMLQNELTRVKYKDKYGKAHFFDSEHRQNIINGLFKINSKRVNAERLIKYLSDNHKDLNAIEIVSGVEKGKSFNSTLKTYNDFKTIFSEEFLDSEIYQKELEEIIKVITVFDDKKSIKNYLTKYFGHLEFLDEEKINQLSKLRYTGWGRYSAKLLLDIRDEDTGFNLLQFLRNDEENRNLTNLISDNTLSFDPKIKAIQSKSTVEDDVFDEIKKLAGSPAIKRGILNSIKIVDELVQIIGYPPQNIVIEMARENMTTEEGQKKTKTRKSKLESALKNIENSVLENGKVLHSDEQLQSEKLYLYYLQNGKDIYSLDETGSPAPIYLDQLDQYEVDHIIPYSFLPIDSIDNKVLTHRKNNQRKLDNIPDKETVAHMKPFWEALYNAKLISQTKYQRLTTSERTPDGVLTESMKAGFIERQLVETRQIIKHVARILDNRFSDTKIITLKSQLVTNFRNTFHIAKIRELNDYHHAHDAYLAVVVGQTLLKAYPKLAPELIYGHHVHFNRHEENKATLRKHLYSNIMRFFNNPDSKVSKDIWDCNRDLPIIKHVIYNSQINFVKRTMIKKGAFYNQNPVGKFNKQLAANNRYPLKTKALCLDTSIYGGYGPMNSTLSIIIIAERFNEKKGKIETVKEFHDIFIIDYEKFNNNPFQFLNDTSENGFLKKNNINRVLGFYRIPKYSLMQKIDGTRMLFESKLNLHKATQFKLTKTQNELFFHMKRLLTNSNLMDLKSESAIKESQNFILKHKEEFDNISNQLSAFSQKMLGNTTSLKNLIKGYNERKIKEIDIREETIKYFYDNFIKMFSFVKSGAPKDINDFFDNKYTVARMRPKPDKRLLNATLIHQSITGLYETRIDLSKLGED

SEQ ID NO: 200 - protein, 1334 aa, Staphylococcus pseudintermedius
MGRKPYILSLDIGTGSVGYACMDKGFNVLKYHDKDALGVYLFDGALTAQERRQFRTSRRRKNRRIKRLGLLQELLAPLVQNPNFYQFQRQFAWKNDNMDFKNKSLSEVLSFLGYESKKYPTIYHLQEALLLKDEKFDPELIYMALYHLVKYRGHFLFDHLKIENLTNNDNMHDFVELIETYENLNNIKLNLDYEKTKVIYEILKDNEMTKNDRAKRVKNMEKKLEQFSIMLLGLKFNEGKLFNHADNAEELKGANQSHTFADNYEENLTPFLTVEQSEFIERANKIYLSLTLQDILKGKKSMAMSKVAAYDKFRNELKQVKDIVYKADSTRTQFKKIFVSSKKSLKQYDATPNDQTFSSLCLFDQYLIRPKKQYSLLIKELKKIIPQDSELYFEAENDTLLKVLNTTDNASIPMQINLYEAETILRNQQKYHAEITDEMIEKVLSLIQFRIPYYVGPLVNDHTASKFGWMERKSNESIKPWNFDEVVDRSKSATQFIRRMTNKCSYLINEDVLPKNSLLYQEMEVLNELNATQIRLQTDPKNRKYRMMPQIKLFAVEHIFKKYKTVSHSKFLEIMLNSNHRENFMNHGEKLSIFGTQDDKKFASKLSSYQDMTKIFGDIEGKRAQIEEIIQWITIFEDKKILVQKLKECYPELTSKQINQLKKLNYSGWGRLSEKLLTHAYQGHSIIELLRHSDENFMEILTNDVYGFQNFIKEENQVQSNKIQHQDIANLTTSPALKKGIWSTIKLVRELTSIFGEPEKIIMEFATEDQQKGKKQKSRKQLWDDNIKKNKLKSVDEYKYIIDVANKLNNEQLQQEKLWLYLSQNGKCMYSGQSIDLDALLSPNATKHYEVDHIFPRSFIKDDSIDNKVLVIKKMNQTKGDQVPLQFIQQPYERIAYWKSLNKAGLISDSKLHKLMKPEFTAMDKEGFIQRQLVETRQISVHVRDFLKEEYPNTKVIPMKAKMVSEFRKKFDIPKIRQMNDAHHAIDAYLNGVVYHGAQLAYPNVDLFDFNFKWEKVREKWKALGEFNTKQKSRELFFFKKLEKMEVSQGERLISKIKLDMNHFKINYSRKLANIPQQFYNQTAVSPKTAELKYESNKSNEVVYKGLTPYQTYVVAIKSVNKKGKEKMEYQMIDHYVFDFYKFQNGNEKELALYLAQRENKDEVLDAQIVYSLNKGDLLYINNHPCYFVSRKEVINAKQFELTVEQQLSLYNVMNNKETNVEKLLIEYDFIAEKVINEYHHYLNSKLKEKRVRTFFSESNQTHEDFIKALDELFKVVTASATRSDKIGSRKNSMTHRAFLGKGKDVKIAYTSISGLKTTKPKSLFKLAESRNEL

SEQ ID NO: 201 - protein, 1156 aa, Ruminococcus albus
MGNYYLGLDVGIGSIGWAVINIEKKRIEDFNVRIFKSGEIQEKNRNSRASQQCRRSRGLRRLYRRKSHRKLRLKNYLSIIGLTTSEKIDYYYETADNNVIQLRNKGLSEKLTPEEIAACLIHICNNRGYKDFYEVNVEDIEDPDERNEYKEEHDSIVLISNLMNEGGYCTPAEMICNCREFDEPNSVYRKFHNSAASKNHYLITRHMLVKEVDLILENQSKYYGILDDKTIAKIKDIIFAQRDFEIGPGKNERFRRFTGYLDSIGKCQFFKDQERGSRFTVIADIYAFVNVLSQYTYTNNRGESVFDTSFANDLINSALKNGSMDKRELKAIAKSYHIDISDKNSDTSLTKCFKYIKVVKPLFEKYGYDWDKLIENYTDTDNNVLNRIGIVLSQAQTPKRRREKLKALNIGLDDGLINELTKLKLSGTANVSYKYMQGSIEAFCEGDLYGKYQAKFNKEIPDIDENAKPQKLPPFKNEDDCEFFKNPVVFRSINETRKLINAIIDKYGYPAAVNIETADELNKTFEDRAIDTKRNNDNQKENDRIVKEIIECIKCDEVHARHLIEKYKLWEAQEGKCLYSGETITKEDMLRDKDKLFEVDHIVPYSLILDNTINNKALVYAEENQKKGQRTPLMYMNEAQAADYRVRVNTMFKSKKCSKKKYQYLMLPDLNDQELLGGWRSRNLNDTRYICKYLVNYLRKNLRFDRSYESSDEDDLKIRDHYRVFPVKSRFTSMFRRWWLNEKTWGRYDKAELKKLTYLDHAADAIIIANCRPEYVVLAGEKLKLNKMYHQAGKRITPEYEQSKKACIDNLYKLFRMDRRTAEKLLSGHGRLTPIIPNLSEEVDKRLWDKNIYEQFWKDDKDKKSCEELYRENVASLYKGDPKFASSLSMPVISLKPDHKYRGTITGEEAIRVKEIDGKLIKLKRKSISEITAESINSIYTDDKILIDSLKTIFEQADYKDVGDYLKKTNQHFFTTSSGKRVNKVTVIEKVPSRWLRKEIDDNNFSLLNDSSYYCIELYKDSKGDNNLQGIAMSDIVHDRKTKKLYLKPDFNYPDDYYTHVMYIFPGDYLRIKSTSKKSGEQLKFEGYFISVKNVNENSFRFISDNKPCAKDKRVSITKKDIVIKLAVDLMGKVQGENNGKGISCGEPLSLLKEKN

SEQ ID NO: 202 - protein, 1440 aa, Weeksella virosa
MKTILGLDLGTNSIGWALVEQDFENKQGLILGMGSRIIPMDAGIIGKFAEGSSISQTAERTGYRSIRRLRERHLLRRERLHRVLNILKFLPEHYAAEIDFEKRFGQFLAETEPKLAWKKNAEGKFEFLFQRSFDEMVADFKANGQDIKIPYDWTIYYLRKKALTQKISPQELAWIILNFNQKRGYYQLRGEEEEENPNKKVEFYSLKIVDVVADEQPNKKGDTWYSLHLENGWVYRRSSKIPLYDWKDKVRDFIVTTDINEDGSEKLDKDGEVKRSFRAPKEDDWTLIKKKTEQEIEQFNQTVGSYIYEALLDNPTQKIRGKLVRTIERKFYKSELKKILEKQIELQPELFTEDLYNACARELYRRNVAHQQQLSSRDFVYLFLNDIIFYQRPLRSQKSLISNCSLEFRTIKDKDGNGQIIYLKAIPKSNPYYQEFRVWQWLYNLKIFTKEDDKDVTNQFINKVEDLEALFEFLMNQKEVNHTDILTYLIEPIVKSKYPNAKGKAFKDELKKELKKYRWNYVYDADKDESKSYPMNETRYELRKRLDKVENVPADFMTRKIEQHLWHIIYSVTDKIEFEKALKSFANKYDLHQESFVENFKRFKPFDSDYGTYSEKAIKKLLPLMRVGKYWSWDIIDDKTKTRIGKIITGEYDETIKNRVREKAIDLTEENHFQGLQLWLAQYIVYDRHSEADIAGKWNSVADLEQYLSEFKQHSLRNPIVEQVITETLRVVRDIWKQYGKGAKDYFDEIHIELGREMKNTAEERKRLSSIISENETTNLRIRAILEELMYDENMENVRPYSPMQQEALKIYEDGVLSSSVEIPEDIEKISKKSEPTKSEIQRYKLWLEQKYRSPYTGRPIPLSKLFTPAYQIEHIIPQARFFDDGFSNKVICESEVNALKDKMLGLEFIQNYYGQKVTTSFGEVTILTEDAYKAFVKEHYDKNRSKRNKLLLEEIPEKMIDRQMNDTRYISKYISKVLSNLVRGEKDDEGVNSKNIIPGNGKITGILKQDWGLNDVWNDLILPRFERMNQLTNSTDFTAWNEKHQKFLPSVPLELSKGFQKKRIDHRHHALDALIIACATRDHVNLLNNKHAKSRNERYDLQHKLRHTTPWQDKEGKVRTKFTEFKKPWETFTQDTKKELEKIVVNFKQNLRVINKATNYYEKIVDGKKVMFKQEGVNWAIRKPMHKETVSGKIDLPRVKVSKGKILTATRKSLDTSFNAKTILSITDTGIQKILLNYLKAKGNPELAFSPEGIEEMNQNISLYNDGKPHQPILKVRVFEQGSKFPLGETGNKTTKYVEAAKGTNLFFGVYEDNQGKRSYDTIPLNIVIERQKQGLNSVPETNEKGHRLLFSLSPNDLVYVPIEGEVFDETNPDVNRIYKVVSFSGSQMFCVRQDVATSIVYKLEFSSLNKMERTIDGIMIKEICIKLKVDRLGNISKA

SEQ ID NO: 203 - protein, 1179 aa, Sphaerochaeta globus
MSKKVSRRYEEQAQEICQRLGSRPYSIGLDLGVGSIGVAVAAYDPIKKQPSDLVFVSSRIFIPSTGAAERRQKRGQRNSLRHRANRLKFLWKLLAERNLMLSYSEQDVPDPARLRFEDAVVRANPYELRLKGLNEQLTLSELGYALYHIANHRGSSSVRTFLDEEKSSDDKKLEEQQAMTEQLAKEKGISTFIEVLTAFNTNGLIGYRNSESVKSKGVPVPTRDIISNEIDVLLQTQKQFYQEILSDEYCDRIVSAILFENEKIVPEAGCCPYFPDEKKLPRCHFLNEERRLWEAINNARIKMPMQEGAAKRYQSASFSDEQRHILFHIARSGTDITPKLVQKEFPALKTSIIVLQGKEKAIQKIAGFRFRRLEEKSFWKRLSEEQKDDFFSAWTNTPDDKRLSKYLMKHLLLTENEVVDALKTVSLIGDYGPIGKTATQLLMKHLEDGLTYTEALERGMETGEFQELSVWEQQSLLPYYGQILTGSTQALMGKYWHSAFKEKRDSEGFFKPNTNSDEEKYGRIANPVVHQTLNELRKLMNELITILGAKPQEITVELARELKVGAEKREDIIKQQTKQEKEAVLAYSKYCEPNNLDKRYIERFRLLEDQAFVCPYCLEHISVADIAAGRADVDHIFPRDDTADNSYGNKVVAHRQCNDIKGKRTPYAAFSNTSAWGPIMHYLDETPGMWRKRRKFETNEEEYAKYLQSKGFVSRFESDNSYIAKAAKEYLRCLFNPNNVTAVGSLKGMETSILRKAWNLQGIDDLLGSRHWSKDADTSPTMRKNRDDNRHHGLDAIVALYCSRSLVQMINTMSEQGKRAVEIEAMIPIPGYASEPNLSFEAQRELFRKKILEFMDLHAFVSMKTDNDANGALLKDTVYSILGADTQGEDLVFVVKKKIKDIGVKIGDYEEVASAIRGRITDKQPKWYPMEMKDKIEQLQSKNEAALQKYKESLVQAAAVLEESNRKLIESGKKPIQLSEKTISKKALELVGGYYYLISNNKRTKTFVVKEPSNEVKGFAFDTGSNLCLDFYHDAQGKLCGEIIRKIQAMNPSYKPAYMKQGYSLYVRLYQGDVCELRASDLTEAESNLAKTTHVRLPNAKPGRTFVIIITFTEMGSGYQIYFSNLAKSKKGQDTSFTLTTIKNYDVRKVQLSSAGLVRYVSPLLVDKIEKDEVALCGE

SEQ ID NO: 204 - protein, 1370 aa, Streptococcus gallolyticus
MTKKNYSIGLDIGTNSVGWAVITDDYKVPAKKMKVLGNTDKKYIKKNLLGALLFDSGETAEATRLKRTARRRYTRRKNRLRYLQEIFAEEMTKVDESFFYRLDESFLTTDEKDFERHPIFGNKAEEDAYHQKFPTIYHLRNYLADSSEKADLRLVYLALAHMIKYRGHFLIEGKLNAENTDVQKLFTDFVGVYDRTFDDSHLSEITVDVASTLTEKISKSRRLENLIKYYPTEKKNTLFGNLIALALGLQPNFKMNFKLSEDAKLQFSKDTYEEDLEELLGKIGDDYADLFTSAKNLYDAILLSGILTVDDNSTKAPLSASMIKRYVEHHEDLEKLKEFIKANKSELYHDIFKDKNKNGYAGYIENGVKQDEFYKYLKNTLSKIDGSDYFLDKIEREDFLRKQRTFDNGSIPHQIHLQEMHAILRRQGDYYPFLKEKQDRIEKILTFRIPYYVGPLVRKDSRFAWAEYRSDEKITPWNFDKVIDKEKSAEKFITRMTLNDLYLPEEKVLPKHSHVYETYAVYNELTKIKYVNEQGKESFFDSNMKQEIFDHVFKENRKVTKEKLLNYLNKEFPEYRIKDLIGLDKENKSFNASLGTYHDLKKILDKAFLDDKVNEEVIEDIIKTLTLFEDKDMIHERLQKYSDIFTANQLKKLERRHYTGWGRLSYKLINGIRNKENNKTILDYLIDDGSANRNFMQLINDDTLPFKQIIQKSQVVGDVDDIEAVVHDLPGSPAIKKGILQSVKIVDELVKVMGDNPDNIVIEMARENQTTNRGRSQSQQRLKKLQSSLKELGSNILNEEKPSYIEDKVENSHLQNDQLFLYYIQNGKDMYTGDELDIDHLSDYDIDHIIPQAFIKDDSIDNRVLTSSAKNRGKSDDVPSLDIVRARKAEWVRLYKSGLISKRKFDNLTKAERGGLTEADKAGFIKRQLVETRQITKHVAQILDARFNTEHDENDKVIRDVKVITLKSNLVSQFRKDFEFYKVREINDYHHAHDAYLNAVVGTALLKKYPKLASEFVYGEYKKYDIRKFITNSSDKATAKYFFYSNLMNFFKTKVKYADGTVFERPIIETNADGEIAWNKQIDFEKVRKVLSYPQVNIVKKVETQTGGFSKESILPKGDSDKLIPRKTKKVYWDTKKYGGFDSPTVAYSVFVVADVEKGKAKKLKTVKELVGISIMERSFFEENPVEFLENKGYHNIREDKLIKLPKYSLFEFEGGRRRLLASASELQKGNEMVLPGYLVELLYHAHRADNFNSTEYLNYVSEHKKEFEKVLSCVEDFANLYVDVEKNLSKIRAVADSMDNFSIEEISNSFINLLTLTALGAPADFNFLGEKIPRKRYTSTKECLTATLIHQSITGLYETRIDLSKLGEE

SEQ ID NO: 205 - protein, 1044 aa, Nitrosomonas sp.
MLHKMRYRLALDLGSTSLGWAMVRLNANQQPCAVIKAGVRIFSNGRNPKDGSSLAVTRREARSMRRRRDRLLKRKARMMRTLIEYGFFPANETQRKALENLNPYALRAKGLDEALTPSEFARALFHINQRRGFKSNRKTDKKDSDSGALKTAIKQLHSVLDPQGNDGKPRTVGELLYKRFTDLSKLPKDRTVRARYRQDKIVKDDGKTKIDKYYDLYIDRAMIEQEFDALWKKQSELNPILFTENARADLKDVLLYQRSLKPVKPGRCTFMSEEERAPLALPSTQRFRMYQEVNNLRILREGLKEESLTLQQRDDLINALEKNNRRTFTQIKKLLGVGGSVQFNFEDPKREELKGNTTSAILGKSEHFGEAWFAFNEAKQDAIVLQLIKEENEAKLVRWLQDETGIDEKRAEVIANAGLPEGYGSLCIEALARILPELRRDVVTYDKAVQAAGFEHHSKLNRNEEIPDITFKIESIDRNSGEIKQFHLHKELPYYGEYLQRHVGFGSGKPEDSIEKRYGKIANPTVHIGLNQVRVVVNALIKRYGHPSEIIVEVARDLKQSKDRRDEENKRQAENQKRNERLRKDIADILGISEERVRRDDIEKMILWEELSFDPADRRCPYSGVQVSTVMLLSDEVEVEHILPFSQTLDDSLNNKTVALRQANRIKGNRTPWEAFGTSNISGFDYSGILTRAELMPKAKRYRFAEDGYQRWLKDDAGFLARALNDTRHLSKIAREYMSLICPNTRVIPGQMTAMLRRNFGLNDVLGLNGEKNRNDHRHHAVDACVIAVTDQGLLQRFAAASASARERQLNRLVENMPLPWESYREHVRRAIDGIWVSHRPDHSHEGAMHNDTAYGLRGNGRVSFHKMVEGKREYIEDNLKVIEITDTKAIDRHGLLPTGKPRPYKGYKGDSNYCIEIVRNEKGRWEGEIISTFDAYQLVRKYGIVQLRYPVLSVSGKPLVMRLIRNDFVRLEHEGITRTLRVCKMREDGQVALADVTEANVDARTRTKEICYVFKTGGSLQKAKARRITISPIGELRDPGFKE

SEQ ID NO: 206 - protein, 1045 aa, Acidovorax avenae
MQKEKPLAYRLALDLGSTSLGWAVLRLSAPGEPSAVIRAGSRIFSDGRNPKDGSSLAVTRRAARAMRRRRDRLLKRKARMLAALERHGFFPQDEAARKALEKLNPYGLRARGLESALKPEEFGRALFHLNQRRGFQSNRKTDRKDSDSGALKQAIGTLRAQMHESGCRTVGEWFWKVRMERKPEGVKGQGVRARYRETPFTTDEGKKRIDKRYDLYVDRAMVAQEFDALWAAQATFAPALFNEAARAELRDILLHQRKLRPVQPGRCTLVPEEPRALLALPSTQRFRIYQEVNHLRVLHDELREEALTLAQRDQIVALLERQAKVTFTAMRKALGFSALFNLEDAKRDGLKGNATTAALGKKDLFGPLWAGFDTALQDEIVTQLMTEESEPRLIAWLQEHTGVDEARAQAIANAGLPEGYGSLGRTALARIVPELQRDVITYDKAVQAAGFAHHSDLGFSFEHDADEVERIGERTIASTGEIKPVFAFKQLPYYGRALQRHVAFAKENPRNDEERYGKIANPTVHIGLNQVRVVVNALMCRYGRPTEVVIELARDLKQSREQKLEAQQRQADNQKRNARIRRSIAEVLGISEERVRTLDIQKWILWEELSHDAADRRCPYSGVQISASMLLGERVEIEHILPFSMTLDDSLNNRTVALREANRIKRNRTPWDARTDFEAHGWSYDGILQRAERMPQRKRHRFAPDGYERWLGEDKDFLARALNDTRYLSRVAAEYLRLVCPGSATRVIPGQMTALLRGKFGLNDVLGLDGEKNRNDHRHHAVDACVIGVTDQRMMQRFAQANAQAREDGLTRLVEDMPLPWPTYRAHVERAVRHIWVSHKPDHGFEGAMMEETSYGILRDGTIKQRRKADGSAGREISRLIRITEPSQPQRHGVDAEGRPLPYKGYVGGSNYCLEITVNDKGKWEGQVISTFDAYRIVREGGLRQLRHSTQGQNGQALAMRLVIGDSVRLEVDEQERVMRIVKINGNNGQVFMAPVHEANVDARNSDKNEAFAYTSKIAGSFQKTKARQVTISPIGELRDPGFKG

SEQ ID NO: 207 - protein, 1218 aa, Prevotella denticola
MKASEEKLSKGLSTYMKENNLLTVGAAFAQLEDEGVRIRNNNNYRAIRSQFQHEIETIFMFQQGLSENELYERLVSEKKNIGTIFYKRPLRSQRGNVGKCTLERTKPRCAIGHPLFEKFRAWTLINNIKIRMSEEEQAEQLPMKLRFELYNDCFLAFVRAEFKFEDIRKYLEKRLGVHFSYNDKTINYKDSTSVAGCPITARFRKLLGEDWESFHVDGQKQRQAHGKNNASFHTVSYSTNDIWHFCYDAEEPEAVLSFAQDNLKWEKKKAEELVRIWSAIPQGYAMLSQKAIRNINKMLILGLKYSDAVLLAKVPEIVEITDGEILSVTEDYHRVEAQVGYEKQINNIVNALIAKYKSASEEYRFADHNYEYQLDKSDEKDIIKQIESNIGTRKWSLLDADEQTDILQKVRDKYQNFFRSHERKFVESPKLGECFEEYLMKKFPMVEGEQWKKLYHPSQIAIYRPVSAGKDRSALRLGNPDIGAIKNPTVLRVLNTLRKRVNQLLDDGLISPDETRVVVETARELNDANRKWALDNYNRIRHDENEKIKKILEEFYPKRDGISTDDIDKARYVIDQREMDYFTEEKPYNKDIKKYKLWLEQGGQCMYTGRTINLSNLFDPNSFDVEHTIPESISFDSSDMNLTLCDAHYNRFIKKNHIPADLPNYDKSVVIDGKEYSPIKPRLQRWADRVERLNRNVEYWRGQARRAQNKDRKDQCMREMHLWKMELEYWTKKLERFTITEVTDEFKNSQLVDTRVITRHAVLYLKSIFPHVDVQRGDVTAKFRKILGIQSVDEKKDRSLHSHHAIDATTLTIIPGAAKRERMLELFAKIEEVNKMLSFSGNEDRTGLKQELDGLKNQLNKEVKACRIGHNVSEIGTFINDNIIINHHVKNQALTPVRRRLRKRGHIVGGMDNPRWQTGDALRGEIHKASYYGAITQFAKDKDGKVLLKEGHPLVDPTIKFVIRRELKYKKSTADSGFASWDDLEKAIVDKELFALMKGQFPEETSFKDACEQGIYMIKKGKNGEVDTKLYRIRHIRCKTKQKNALKIKEQAYKSEKEYKRYFYAAVGDLYAMCCYTNGKTREFKIYSLYDISCHRKVGVEDIPEFITDKKGNRLMLDYKLHTGDMILLYKENPEELYDLDNVSLSKLLYKINGFENDGLRIRMVNHLVAKEAMGESVKDYAKLPDIIRCGVKTIKFLVMGENRDFVIKNGKISFNHR

SEQ ID NO: 208 - protein, 1458 aa, Fluviicola taffensis
MTKTILGLDLGTNSIGWALINQDFDNKKGEILGMGSRIIPMTQDIKDEFGKGNSISQTAERTRLRGVRRLIHRTLLRRERLHRVLNIIGFLPEHYANQIDFEKRFGKFKPESEPKISFDGNDVFLFEKSYQEMLVDFKIHQPQLVSNGKKIPHDWTIYYLRKKALSKKIEKEELAWILLNFNQKRGYYQLRGEEEEETPNKLVEFHSLKIVEVNADEPQKGKPEIWYSLVLENGWVYRRASKTPLFDWKDKIREFIVTTEINNDGTVKTDKEGTEKRSFRAPKPEDWTLQKKKTEFELSKSGNEVGAFIYESILQKPNQKIRGKLISTIERKFYKEELKTILKTQLFFHKELKDEKLYNACIEELYKNNEAHRSLLSNKGFEHLFINDILFYQRPLRSKKSQISNCPLEKRTYKKEGIEITEGIKVISKSNPIYQEFRLWQWISNLSLYCIEPTETNVTSTFLNSIEDYENLFEFLNNRKEIEQKHLLKYLLENQGFKGKLLTNELEKFRWNFVADKKYPCNETGSLLHTRLSKVKNISPDFLTKEIEHQLWHIIYSVTDKIEYEQALKTFARKNNLDVDSFFEHFKKIPPFESTYGAYSEKAIKKLLPLIRLGKYWNWEAIDSISKDRISKILSGEYDENIKNRVREKAVHLTSENNFQGLQEWLAKYIVYDRHSEGNDLGKWTSVSDLETYLKEFKQHSLRNPIVEQVITETLRVVKDIWIKHGKGTENFFDEIHVELGREMKNNSEDRKRLTNTITENENTNLRIKALLMEMMNDNDVENVRPYSPSQQEILKIYEDGALNSNIELDDEIVKISKKAEPTKSELQRYKLWLEQKYRSPYTGQVIPLNKLFTSEYEIEHVVPQSRFFDDSFSNKVICESAVNKRKDNQLGLQFIKNHSGEKVELGFGKVVQVFTEEQYLDFVKEHYSKNRSKHNKLLLEEIPEKMIERQLNDTRYISKFVSSILSNIVRSEKDDDGLNSKNILPGNGKITTELKRDWGLNDVWNDLILPRFERMNTITNSDLFTTYNDKYQKHLPTVPFEYSKGFQKKRIDHRHHAMDALVIACATRDHLNLMNNQSAKSELKRYDLQNKLRKKEPYFNQKENKQKEAFKDFIKPWGTFTEDSKNALEKIIISFKQNLRVINKATNSYESYKDEDGNLRIGKDGKPEKGLIKQKGLNWAIRKPLHKDTVSGQINLSRIKLPNGKILTATRKNLDTSFDLKTIENSITDTGIQKILKNYLLSKESPELAFSPEGLEEMNNEIEKYNNGKFHHPINKARIYELGSKFNVGQTGNRRDKFVEAAKGTNLFFAIYQDENKNRSYETIPLNEVIEHQKWRASLPKEEQEKIPLVPVNKLKGTFIFSLSPNDLVYVPSNDELERSASIDFSKLKKEQINRLYKMVSSSGSQCFFVKSEVATSVVNKMEYSSLNKMEKSIDNLMVKEICIKLKIDRLGNISKA

SEQ ID NO: 209 - protein, 1384 aa, Coriobacterium glomerans
MKLRGIEDDYSIGLDMGTSSVGWAVTDERGTLAHFKRKPTWGSRLFREAQTAAVARMPRGQRRRYVRRRWRLDLLQKLFEQQMEQADPDFFIRLRQSRLLRDDRAEEHADYRWPLFNDCKFTERDYYQRFPTIYHVRSWLMETDEQADIRLIYLALHNIVKHRGNFLREGQSLSAKSARPDEALNHLRETLRVWSSERGFECSIADNGSILAMLTHPDLSPSDRRKKIAPLFDVKSDDAAADKKLGIALAGAVIGLKTEFKNIFGDFPCEDSSIYLSNDEAVDAVRSACPDDCAELFDRLCEVYSAYVLQGLLSYAPGQTISANMVEKYRRYGEDLALLKKLVKIYAPDQYRMFFSGATYPGTGIYDAAQARGYTKYNLGPKKSEYKPSESMQYDDFRKAVEKLFAKTDARADERYRMMMDRFDKQQFLRRLKTSDNGSIYHQLHLEELKAIVENQGRFYPFLKRDADKLVSLVSFRIPYYVGPLSTRNARTDQHGENRFAWSERKPGMQDEPIFPWNWESIIDRSKSAEKFILRMTGMCTYLQQEPVLPKSSLLYEEFCVLNELNGAHWSIDGDDEHRFDAADREGIIEELFRRKRTVSYGDVAGWMERERNQIGAHVCGGQGEKGFESKLGSYIFFCKDVFKVERLEQSDYPMIERIILWNTLFEDRKILSQRLKEEYGSRLSAEQIKTICKKRFTGWGRLSEKFLTGITVQVDEDSVSIMDVLREGCPVSGKRGRAMVMMEILRDEELGFQKKVDDFNRAFFAENAQALGVNELPGSPAVRRSLNQSIRIVDEIASIAGKAPANIFIEVTRDEDPKKKGRRTKRRYNDLKDALEAFKKEDPELWRELCETAPNDMDERLSLYFMQRGKCLYSGRAIDIHQLSNAGIYEVDHIIPRTYVKDDSLENKALVYREENQRKTDMLLIDPEIRRRMSGYWRMLHEAKLIGDKKFRNLLRSRIDDKALKGFIARQLVETGQMVKLVRSLLEARYPETNIISVKASISHDLRTAAELVKCREANDFHHAHDAFLACRVGLFIQKRHPCVYENPIGLSQVVRNYVRQQADIFKRCRTIPGSSGFIVNSFMTSGFDKETGEIFKDDWDAEAEVEGIRRSLNFRQCFISRMPFEDHGVFWDATIYSPRAKKTAALPLKQGLNPSRYGSFSREQFAYFFIYKARNPRKEQTLFEFAQVPVRLSAQIRQDENALERYARELAKDQGLEFIRIERSKILKNQLIEIDGDRLCITGKEEVRNACELAFAQDEMRVIRMLVSEKPVSRECVISLFNRILLHGDQASRRLSKQLKLALLSEAFSEASDNVQRNVVLGLIAIFNGSTNMVNLSDIGGSKFAGNVRIKYKKELASPKVNVHLIDQSVTGMFERRTKIGL

SEQ ID NO: 210 - protein, 1077 aa, Neisseria bacilliformis
MQQKPQRYILGLDLGIASVGWACVWADENEHPTGLLDCGVRTFERAEVPKTGDSLALARRQARSVRRLIRRRAHRLLRLRRLLKREGVLLSADFNENGLVRGLPIDAWALRVAGLDRKLSNKEWAAVLLHLVKHRGYLSQRKNETQSKDKELGRLLAGVNGNREALQNRSDEYRTAAELAVKKFAAENNGSLRNKGGDYSHTFDRKDLQRELHLLFERQRALDNPFTSSEMEAAVDELLMKQRSALQGEAVLKMLGRCTFEPSEYKAAKNTYSAERFVWLTKLNNLRIQYNGEERALSEAERRLLLDEPYQKAKLTYKQVRTILELPESAVFKGLRYGHGEDGLKAESGTLMEMKAYHAVRKALKDAGLEGEWENRIRNPELLDAIGTAFSLYKTDEDIRANLAAFRLSENVLEALLAGLNFDKFVHLSLKALAKILPLMEQGMRYDEACKEAYGDHYGAKEQEDHRLLPPFVADDIRNPVVFRTLTQARKIVNEIVRRYGSPLRVHIETGREVGKSFSDRKEIEKRQEENRKERERAAAHFKELFPNFAGEPKAQDILKLRLYEQQHGKCLYSGKEIDLRRLPEKGYVEIDHALPFSRTWDDSFNNKVLVLGKENQDKRNRTPYEYLDGKGNSGAWRAFAERVSGCRFPYAKKQRLLTQKLDEKTEQGFLERNLNDTRYVARFLCQFIEEKMHLEGAGKKRVFASNGQITALLRGFWGLKKVREENDRHHALDAVVVACSSVSMQQKITRHFRYREELEHIDRETGEVIHGFPQPWEFFRQEVMTRVFSDDPVSELAEKLDSRPEAVHEFVTPLFVSRAPHRKVTGQGHLETIRSAKRLDEKISVVKLPLTQLKTKDIERIVGYPNREPALYDALAARLAAFKDDPAKAFSEPFYKTGKDGKCGVLVKAVRVENVQKSGLLVRKDESGKMQGVADNATMVRVDVFGKNGKNYLVPVYAWQVEKGELPNRAVVAYADEEDWDEMDDSFEFKFSLYPNDLVEVVTKKDKFFGYYSGFNRATGAINIKEHDLSKSKVKNGVYEGIGVKTAQSFQKYQVDTLGKTIRLCKPEKRMGFKKK

SEQ ID NO: 211 - protein, 1029 aa, Alicycliphilus denitrificans; identical to SEQ ID NO: 188

SEQ ID NO: 212 - protein, 1122 aa, Streptococcus suis; identical to SEQ ID NO: 82

SEQ ID NO: 213 - protein, 1428 aa, Parasutterella excrementihominis
MGKTHIIGVGLDLGGTYTGTFITSHPSDEAEHRDHSSAFTVVNSEKLSFSSKSRTAVRHRVRSYKGFDLRRRLLLLVAEYQLLQKKQTLAPEERENLRIALSGYLKRRGYARTEAETDTSVLESLDPSVFSSAPSFTNFFNDSEPLNIQWEAIANSPETTKALNKELSGQKEADFKKYIKTSFPEYSAKEILANYVEGRRAILDASKYIANLQSLGHKHRSKYLSDILQDMKRDSRITRLSEAFGSTDNLWRIIGNISNLQERAVRWYFNDAKFEQGQEQLDAVKLKNVLVRALKYLRSDDKEWSASQKQIIQSLEQSGDVLDVLAGLDPDRTIPPYEDQNNRRPPEDQTLYLNPKALSSEYGEKWKSWANKFAGAYPLLTEDLTEILKNTDRKSRIKIRSDVLPDSDYRLAYILQRAFDRSIALDECSIRRTAEDFENGVVIKNEKLEDVLSGHQLEEFLEFANRYYQETAKAKNGLWFPENALLERADLHPPMKNKILNVIVGQALGVSPAEGTDFIEEIWNSKVKGRSTVRSICNAIENERKTYGPYFSEDYKFVKTALKEGKTEKELSKKFAAVIKVLKMVSEVVPFIGKELRLSDEAQSKFDNLYSLAQLYNLIETERNGFSKVSLAAHLENAWRMTMTDGSAQCCRLPADCVRPFDGFIRKAIDRNSWEVAKRIAEEVKKSVDFTNGTVKIPVAIEANSFNFTASLTDLKYIQLKEQKLKKKLEDIQRNEENQEKRWLSKEERIRADSHGICAYTGRPLDDVGEIDHIIPRSLTLKKSESIYNSEVNLIFVSAQGNQEKKNNIYLLSNLAKNYLAAVFGTSDLSQITNEIESTVLQLKAAGRLGYFDLLSEKERACARHALFLNSDSEARRAVIDVLGSRRKASVNGTQAWFVRSIFSKVRQALAAWTQETGNELIFDAISVPAADSSEMRKRFAEYRPEFRKPKVQPVASHSIDAMCIYLAACSDPFKTKRMGSQLAIYEPINFDNLFTGSCQVIQNTPRNFSDKTNIANSPIFKETIYAERFLDIIVSRGEIFIGYPSNMPFEEKPNRISIGGKDPFSILSVLGAYLDKAPSSEKEKLTIYRVVKNKAFELFSKVAGSKFTAEEDKAAKILEALHFVTVKQDVAATVSDLIKSKKELSKDSIENLAKQKGCLKKVEYSSKEFKFKGSLIIPAAVEWGKVLWNVFKENTAEELKDENALRKALEAAWPSSFGTRNLHSKAKRVFSLPVVATQSGAVRIRRKTAFGDFVYQSQDTNNLYSSFPVKNGKLDWSSPIIHPALQNRNLTAYGYRFVDHDRSISMSEFREVYNKDDLMRIELAQGTSSRRYLRVEMPGEKFLAWFGENSISLGSSFKFSVSEVFDNKIYTENAEFTKFLPKPREDNKHNGTIFFELVGPRVIFNYIVGGAASSLKEIFSEAGKERS

SEQ ID NO: 214 - protein, 1371 aa, Lactobacillus buchneri
MKVNNYHIGLDIGTSSIGWVAIGEDGKPLRIKGKTAIGARLFQEGNPAADRRMFRTTRRRLSRRKWRLKLLEEIFDPYITPVDSTFFARLKQSNLSPKDSRKEFKGSMLFPDLTDMQYHKDYPTIYHLRHALMTQDEKFDIRMVYLAIHHIVKYRGNFLNSTPVDSFKASKVNFVDQFKKLNELYTAINPEESFQINLANSEDIGHQFLDPSIRKFDKKKQIPKIVPVSVDDKATDKINGKIASEIINAILGYKSKLDVVVQCTPVDSKSWALKFDEEDIDAKLQKILPEMDENQQSIIAILQNLYSQVTLNQIVPNGMSLSESMIEKYNDHHDHLKLYKKIIDQLADPKKKAALKKAYSQYVGDDGKVIEQADFWSSVKKNLDDSDLSKQIMDLIDAEKFMPKQRTSQNGVIPHQLHQRELDEIIEHQSKYYPWLAEINPNKHDLHLAKYKIEELVAFRVPYYVGPMITPDDQAKSAETVFSWMERKGKEAGQITPWNFDEKVDRNASANRFIKRMTTKDTYLIGEDVLPDESLLYEKFKVLNELNMVRVNGKLLKVADKQAIFQDLFENYKHISVKKLQNYIKSKTGLPSDPEISGLSDPEYFNNSLGTYNDFKKLFGNKVDEPDLQDDFEKIVEWSTVFEDKRILREKLNEITWLSDQQKDVLESSRYQGWGRLSKKLLTGIVNDQGERIIDELWNTNKNFMQIQSDNDFAKRIHEANADQMKAVDVEDVLADAYTSPQNKKAIRQVVKVVDDIQKAMGGVAPKYISIEFTRSEDRNPRRTISRQRQLENTLKDTAKSLAKSINPELLSELDNAAKSKKGLTDRLYLYFTQLGKDIYTGKPINIDEISTYDIDHILPQAFVKDDSLNNRVLVSKAINNGKSDNVPVQLFGAKMGHFWKQLAEAGLISKRKLKNLQTDPDTISKYAMHGFIRRQLVETSQVIKLVANILGDKYRNDNTKIIEITARMNHQMRDEFGFIKNREINDYHHAFDAYLTAFLGRYLYHRYIKLRPYFVYGDFKKFKEDKVTMRNFNFLHDLTDDTQEKIADAETGEVIWDRENSIQQLKDVYHYKFMLISHEVYTLRGAMFNQTVYPASDAGKRKLIPIKADRPINVYGGYSGSADAYMAIVRIHNKKGDKYRVVGVPMRARDRLDAAKKVSDADCDRALKDVLTPQLTKTKKSRKTGEITQVVEDFEIVLGKVMYRQLMIDGDKKFMLGSSTYQYNAKQLVLSDQSVKTLASKGRLDPLQESMDYNNVYTEILDKVNQYFSLYDMNKFRHKLNLGFSKFISFPNHNVFDGNTKASSGKREILEEVLNGLHANPTFGNLKDIGITTPFGQLQQPNGILLSDEAKIRYQSPTGLFERTVSLKDL

SEQ ID NO: 215 - protein, 1090 aa, Sphingomonas sp.
MDWRLGLDLGANSLGWAALRLDRAGDPIGILAMGSRIFSDGRDPKSGASLAVDRRAARAMRRRRDRFKQRQAALLKYLIRDGLFPADQADRQRLADEDPYALRARALDEELSLFEIGRALFHLNQRRGFQSNRKADRGQDDEAGKIAVGVDRLNQQMEEQGARTLGEFLHQRRRAATDANHIPSVRTRLRPETGEGAKGDGYDFYPSRALIAEEFEEIWAAQAPHYPDTLTQQVHDRLYEIIFHQRPLRAPQVGQCTLVAGETRLPKAHPLFQKRRLLEEINALMIVRPGEIAQRLTPEERDTLYLKLKDKRTVSFATLRKTLKLDSAARFNKESENRTELKGDEVAAELGAKTRLGTRWQHLSGDQQWEVVHRLMALESQADEAAFRDWISQTYDLLPEQAAAVLGARLPQGHGRFGPTATTTLIDSLLHDRTEDGRVVVYSEAVQRSGLGHHSDLRHDRDDEDVTELPYYGVALERHIMPGTAEPTDPEEMRIGRLTNPTVHIGLNQLRHVVNRLIRAYGPPKEIAIELARELKLSEDEKKKRNSENRDNRLAAEGRSKKLEEIRQRDTGANRALLKLWEELNPGNVLDRRCIYTGEQISIDMLFSDRVEVDHILPFAQTLDDSNGNKLLCLREANREKRRRSPYEAWGHTDRWPDIAERASRLPKPKRWRFEPDAMQRFATEDGFLARHLVDTQYLGRLAREYLSWLYPGRGEGSGHVWVSPGRLTEMVRRKLGLNDLLPDHNFGGGADQPKNRLDHRHHAIDALVVAIVDRGMLQAIARASGQDGSEGRERIHIPAPWDGFRDDLRVAVNGIIVSHRPDHGTVAKAGLARGRDQTAGRLHNDTAYGLTGETDAKGNSIVVRRIPLSAIKKPADIARVRDPLLRNALAEFTKGLDGKAFEARIGRFHELGPLLYRGIRRVRVVETLTVIPIRDAEGRAYKGYKGDSNYRYDVWEMPDGKWRCQVVSMFDAHQSTEQARPHPAARKILSLQRNDILAIERTEGDRELVRVVKFSEKQFAVAPPHEGGSLKTRDGNADDPFRYLYPSPNTLKGWRARQVRIDELGRVLDPGFPARKSVRRTRPRAAPVD

SEQ ID NO: 216 - protein, 1000 aa, Kingella kingae
MARAQRRLISRRANRMNKLRRLLKQENVLQANDYDEKGLIIGLPNQAWELRAQGLDRKLEPKEWAAVLINLVKHRGYLSQRKNESQTADKELGALLSGMNHNHQLLQSQSNQYRTPAELAIKQFATQDGHIRNQRGAYTHTFNRLDLQNELNQLFDAQTRLGNPHVSGSLKTAINDLLMNQKAALSGDAILEMLGRCTFEPSEYKAAKNTYSAERFVWLGKLTNLRIQDNGLESALSREQRELLLNEPYNKTKLTYQQVRKLLRLPETAFFKGLRYGKDNAESATFMEMKSYHAIRKSLENKSLKSEWEKLKTQPKLLDLIGTAFSIYKTDDEIAGCLKNQLPENVIIALQEQLNFSNFMELSLKALEKLLPLMEQGLRYDEACTQIYGNRHEKIADKTEKFLPNIPADKLRNPVVLRTLTQARKVINAIIRRYGSPARVHIETGREVGKSFSDRDKLKKQQEENQEQRRRAIDEWKQFFPNAAHEPKAVDILKLRLYQLQQGKCLYSGLPIDVRRLPEKGYVEIDHALPFSRTWDDSFNNKILVLASENQNKGNQTPYEYLRGADNSESWRLFVENVQNCQFSPNKKQKIMAKQLDEKGFLERNLNDTRYVSRFLCQFISEHLHLTGKGKKRVFASNGQITALLRGRWGLSKNREENDRHHAVDAVVVACSTVAMQQKITQFVRYQKGNVFTGERIDKETGEVISIHFPTPWEHFREEVMIRVFDDNPLRTLPEKLPNRPEALHEYVMPLFVSRMPTRKMTGQGHKETIKSAKRLDEKISVLRVPLTQLKLNDLENMVNREREPALYEALKARLEQFKNDPAKAFAEPFFKQGGQQVKAVRVEIVQKSGMLLRKINGVADNGSMVRVDVFEKSGKFYLVPIYAWQVAEGILPNYAVVAHKDESDWILMDESYHFKFALYKNDLLEVQTKKGGIMGYFASLDRATGAITIREHDRDKKKCKDGEHRSIGVKMASSFKKLQVDELGKNIHETRSRKRPNIG

SEQ ID NO: 217 - protein, 1130 aa, Streptococcus pasteurianus
MTNGKILGLDIGIASVGVGIIEAKTGKVVHANSRLFSAANAENNAERRGFRGSRRLNRRKKHRVKRVRDLFEKYGIVTDFRNLNLNPYELRVKGLTEQLKNEELFAALRTISKRRGISYLDDAEDDSTGSTDYAKSIDENRRLLKNKTPGQIQLERLEKYGQLRGNFTVYDENGEAHRLINVFSTSDYEKEARKILETQADYNKKITAEFIDDYVEILTQKRKYYHGPGNEKSRTDYGRFRTDGTTLENIFGILIGKCNFYPDEYRASKASYTAQEYNFLNDLNNLKVSTETGKLSTEQKESLVEFAKNTATLGPAKLLKEIAKILDCKVDEIKGYREDDKGKPDLHTFEPYRKLKFNLESINIDDLSREVIDKLADILTLNTEREGIEDAIKRNLPNQFTEEQISEIIKVRKSQSTAFNKGWHSFSAKLMNELIPELYATSDEQMTILTRLEKFKVNKKSSKNTKTIDEKEVTDEIYNPVVAKSVRQTIKIINAAVKKYGDFDKIVIEMPRDKNADDEKKFIDKRNKENKKEKDDALKRAAYLYNSSDKLPDEVFHGNKQLETKIRLWYQQGERCLYSGKPISIQELVHNSNNFEIDHILPLSLSFDDSLANKVLVYAWTNQEKGQKTPYQVIDSMDAAWSFREMKDYVLKQKGLGKKKRDYLLTTENIDKIEVKKKFIERNLVDTRYASRVVLNSLQSALRELGKDTKVSVVRGQFTSQLRRKWKIDKSRETYHHHAVDALIIAASSQLKLWEKQDNPMFVDYGKNQVVDKQTGEILSVSDDEYKELVFQPPYQGFVNTISSKGFEDEILFSYQVDSKYNRKVSDATIYSTRKAKIGKDKKEETYVLGKIKDIYSQNGFDTFIKKYNKDKTQFLMYQKDSLTWENVIEVILRDYPTTKKSEDGKNDVKCNPFEEYRRENGLICKYSKKGKGTPIKSLKYYDKKLGNCIDITPEESRNKVILQSINPWRADVYFNPETLKYELMGLKYSDLSFEKGTGNYHISQEKYDAIKEKEGIGKKSEFKFTLYRNDLILIKDIASGEQEIYRFLSRTMPNVNHYVELKPYDKEKFDNVQELVEALGEADKVGRCIKGLNKPNISIYKVRTDVLGNKYFVKKKGDKPKLDFKNNKK

SEQ ID NO: 218 - protein, 1119 aa, Lactobacillus coryniformis
MGYRIGLDVGITSTGYAVLKTDKNGLPYKILTLDSVIYPRAENPQTGASLAEPRRIKRGLRRRTRRTKFRKQRTQQLFIHSGLLSKPEIEQILATPQAKYSVYELRVAGLDRRLTNSELFRVLYFFIGHRGFKSNRKAELNPENEADKKQMGQLLNSIEEIRKAIAEKGYRTVGELYLKDPKYNDHKRNKGYIDGYLSTPNRQMLVDEIKQILDKQRELGNEKLTDEFYATYLLGDENRAGIFQAQRDFDEGPGAGPYAGDQIKKMVGKDIFEPTEDRAAKATYTFQYFNLLQKMTSLNYQNTTGDTWHTLNGLDRQAIIDAVFAKAEKPTKTYKPTDFGELRKLLKLPDDARFNLVNYGSLQTQKEIETVEKKTRFVDFKAYHDLVKVLPEEMWQSRQLLDHIGTALTLYSSDKRRRRYFAEELNLPAELIEKLLPLNFSKFGHLSIKSMQNIIPYLEMGQVYSEATTNTGYDFRKKQISKDTIREEITNPVVRRAVTKTIKIVEQIIRRYGKPDGINIELARELGRNFKERGDIQKRQDKNRQTNDKIAAELTELGIPVNGQNIIRYKLHKEQNGVDPYTGDQIPFERAFSEGYEVDHIIPYSISWDDSYTNKVLTSAKCNREKGNRIPMVYLANNEQRLNALTNIADNIIRNSRKRQKLLKQKLSDEELKDWKQRNINDTRFITRVLYNYFRQAIEFNPELEKKQRVLPLNGEVTSKIRSRWGFLKVREDGDLHHAIDATVIAAITPKFIQQVTKYSQHQEVKNNQALWHDAEIKDAEYAAEAQRMDADLFNKIFNGFPLPWPEFLDELLARISDNPVEMMKSRSWNTYTPIEIAKLKPVFVVRLANHKISGPAHLDTIRSAKLFDEKGIVLSRVSITKLKINKKGQVATGDGIYDPENSNNGDKVVYSAIRQALEAHNGSGELAFPDGYLEYVDHGTKKLVRKVRVAKKVSLPVRLKNKAAADNGSMVRIDVFNTGKKFVFVPIYIKDTVEQVLPNKAIARGKSLWYQITESDQFCFSLYPGDMVHIESKTGIKPKYSNKENNTSVVPIKNFYGYFDGADIATASILVRAHDSSYTARSIGIAGLLKFEKYQVDYFGRYHKVHEKKRQLFVKRDE

SEQ ID NO: 219 - protein, 1126 aa, Lactobacillus farciminis
MADRISLGLDIGVASVGFSVLDIDKGKVIELGARLFSATVAAGNQDRRDMRGARRLLNRNKQRRQDTGKLFKKFGLIDDFDKGSFYDNFNQNLNPYELRVKGLTEQLTKEELAESLYQIVKHRGISYALKDADVDEGGTDYSVSLKINSQELAEKTPAQIQLQRLNDYGKVRGQVVIGDDPDNQKVLLNVFPTSAYEKEAKQIIATQQQFYPESLTDKFTEEYCQILTRKRDYFVGPGNEKSRTDYGIYKTDGRTLDNLFEELIGHDKIYPEELRASAASYTAQLFNVLNDLNNLRILNYEDGKLTKEDKEKIIAEIKNNTTTINMLNVIKKVAGCSKDDIKGFRVNEKDKPEISSMPVYRKIHKDLLKAGVDISDWPVEFIDELSFILTLNTENGEIRKQLNNRLAPKFDFLNADLIQLIIDNKDSFEIKTNNKWHRFSVKTMNKLIPEMMERPVEQMTLLNEMGLVKKDKKRFENNKYLPYKEIAKDIFNPVASKSVREALKIVNAVLKKYGHIDYLVVEMPRDKNLKEEQDNIKEFQNKNKKAKDAAFEAFVKSVGSEQRVKEALSKNRKLQMKMRLWYQQQEIDPYNGKTIDATDLINNPDKFEIDHIIPQSISFYDSINNKTLCFASMNQVKGQKTPYEFMLEGHGQSYDKFKATVMANKNFGKAKRANYLFEENVSDIETRKRFLSRNLVDTRYSSRVVLNSLQDFFREKSADTKVTVIRGKFTSNMRKHWHIDKTRETFHHHAIDASIIAATPFLRMWKKGGTIFPVKVGEESIDIETGEILDDKNFDKAMYEEPYSGFVSEIMNADDRIKFSHQVDKKMNRKVSDATIYSTRTGKLAKDKKDAEYIVAKVKDIYSVDGFKKFKKVYDKDKTKFLLYKYDPRTFSKLERIISDCPDKVEKVQTNGKVKAVDISPFEMYRRDHGMIKKYSKKGNGPAIKQLKYLDKKLGSHIDITPANANGKHVILQSLKPWRTDVYLNHETGEYEIMGIKYSDLKFNKNEGYGIKKDKYLEIKKVEEVSEKSEFMFSLYRKDRVKVQDMKTGESVELLFWSRNFSNKKYAELKPISQAENDKKLPVYGKGRLIKRLIPKNCKIWKVNTTILGDPYYLEKESDSPKDILD

SEQ ID NO: 220 - protein, 1380 aa, Eggerthella sp.
MNLRHVGNYNIGLDMGTASVGWAAIDEQGELLHFKGKPTWGSRLFDSANTAATARMPRGQRRRYIRRRWRLDLLQKFFSEEMAEKDPEFFIRLRQSSLWPEDREGGHTAYHWPLFNDSDFNEKEYYEKFPTIFHLRQWLMETDEKADIRLIYLAFHNIVKHRGNFLQENNDSLSAQNANMRESLESFCIALEEWCDEKELTCSCDPQKLEHLFKEVKYRSDIRDGFAALLGLACSGENEVDVKAMAKEMGKAIVGYKADFSKIFTECDKEGSSFRLSDDEGPEAFLDICPDDGIALFEAIQMVYSSFILTGMLTEKGLSLSKISAYNQYGQDLESLKALVKEYVPNEYSSFFRGPTYSGSTEYDPSKAQGYTRYNLGPSKKGSGAKPMAYEDFKKSVEQLFANTNAINDERYKEMMGRFAEEKFLRRLRTSDNGRIPFQLNLEEMTAIIINQGKYYPFLLEQQEKLESLVRFRIPYYVGPLTRINARLDSKGNACFAWSKRKDGMDSASIKPWNWDEVIDKHASAQAFIERMTGTCTYLRGEPVLPRCSLLYEEYCVLNELNGARWTQDGDKFIRFDYKDRSDIIEELFKKRRGRIQYAAVADWMKQERSHANVHVSGGQGENAFESRLSSYHFFCNDVFGVDELPGSYVDMVEEIILWSTLFEDRSILREEIQRKYGDVLNEEQIKTICKKRFSGWGRLSRKLLCSLKAQTDNGPKSIMDILQEGDQNNGRVGRAMVFQEILHDEQLGFEQKIEEENTQSMLEGENLLIEDLPGSPAIRRSINQAVRIVDEIVGIAGHAPDNIFIEVTREDDTKKKGKRTTTRYSNIQKALEALKEEGAEALRELKTYKHNELDKRLSLYFMQNGKSLYSGIPLDIRRLSEYQIDHIIPQSYIKDDSYENMALVLPGENQSKADNLLISQDIRIKMKATWTALHKAGLMGDKKYNNLMNSSISDAKMKGFINRQLVETSQSVKLTQMMLSQKYPGAKVRPIKASISSQLRDACDLVKCREANDYHHAHDAYLACQVGRFVLKRHSSMFDNPIGMTKVIRDFVKRQGQEFKRNGKLPAYASRSGFIVQSFMRSGFDAETGELLRDDWNAPFEIARIKRCLNYRDCYISRMPMEDSGAFWDATIYSPKAGKKGALPVKQGLPVEKYGSYSREQFAYFFVYKAYNPKKKAYRLEFEAVPVRVASAVETRENALEEYAKSVAKQAGLEFVEVARPKVYKYQLIELGEDRLYITGKREVRNASQLAFSLDEIDLLKRLAEGEETSSEERERLFDVLIEKYARYAPRLARQLSVDSMSATFETLNAEEQLGILLSLVEIANGKRNMIDLSSAGGSKNAGCMNPTFSSELSSPGSNFTFIDQSVTGMFERRQRLEL

SEQ ID NO: 221 - protein, 1430 aa, Capnocytophaga canimorsus
MKHILGLDLGTNSIGWAVVKEAQNDNEQSEIVDVGVRVNPLTTDEKTNFEKGKPISTNADRTLKRSARRNLQRYKLRRKELIELLKEHQLISTDTILTENGKGTTFQTLELRAKSAKEKISLEELARVFLTINKKRGYKSSRKAKNEDEGQLIDGMEIAKRLYEENLTTGQLSLQLLKEGKKSLPDYYRSDLQFELDKVWNFQKQFHSHILTDEFYAQLKGKGQRATSALFLAKYQIYTAENKGSREDKKLQAYQWRVDALSKELTREQLAFVITEINNNLNNSSGYLGAISDRSKELYFNNETVGEYLWKQIAANPHTSLKNQVFYRQDYLDEFEQIWKTQSAFYPEILTDELKKELRDVVIFYQRKLKSQKSLVSFCEFENKEIEIKKEDGTSTKKVIGLKVAPKSSPLFQEFKIWQNLNNVLIRKKGSKTKKVDKNQQAVLFEEEKTIFELDLEAKQALFNELNLKGNLKAYYCLEILGYSPKEWEMNYSVLEGNRTNKALYEAYLKITDLEGYDAKNHLKVKLNKDEVELDDLKVPASEIKDMVQAIFKEAGINTDILHFNAELDGKDFENQASYQLWHLLYSYEGDDSKSGNELLYKLLETKFGFKKEYAQILANVSLSDDYGSLSTKAMRKIHPYIKENKFSTACELAGYRHSKHSLTKEENDNRVLKDSLEVLKKNSLRQPVVEKILNQMINLVNALLKKYRTENPNFKFDEIRIELARELKKNAEERANMTVNINKAKTEHEKIIKILKNEFGLPNPTRNDIIRYRLYEELKANGYKDLYTNEYIEKQDLFTKNIDIEHIIPKSRVFDDSFSNKTLSFRKTNLDKGERTAFDYIESKFGADKLEEYVARVEDLYKNNIISKAKYQKLLKKESEIGDGFVERDLRETQYIAKKAKEILLQITPNVLSTSGGITDRLREDWDLINVMKELNLPKYRALGLTQMEDRKYGQQVEVIIDWTKRNDHRHHAMDALTVAFTKHNHIQYLNYLNARKNEKHREHSNIMGIQQLETIKVTDKNGNEKRVFKAPMPNFRQVTKAFLENVLISHKAKNKVVTKNKNKVAGSNKVQEVLTPRGQLHKETVYGKYQYYVQKEEKIGGKFDLETIKKVANPLYQSLLKKRLEENGGDPKKAFTGKNSLAKNPIYLDDAQTEQLPEKVKLVWLENSFSIRKDITPENFKDEKLIDKILDEGVKRILKERLQSFGNDAKKAFSDLDKNPIWLNKEKGIAIKRVAISGVANAEPLHTKKDHLGKEILDKEGKSIPVDFISTGNNHHVAVYRDEKGNLQEKVVSVFEAVVRANQGLPIIDKTYNQHLGWEFLFTMKQNEMFVFSNESTGFNPNDIDLLDPKNKKIISPNLFRVQKFSKLQYGNSFVREFVFRHHLETTVEDRKELQGITYKQMKNSAFFNDIIKVRINHLGGIVSVGEY

SEQ ID NO: 222 - protein, 1348 aa, Finegoldia magna
MKSEKKYYIGLDVGTNSVGWAVTDEFYNILRAKGKDLWGVRLFEKAKTAADTRTFRSGRRRNDRKGVRLQILREIFEDEIKKVDKDFYDRLDESKFWAEDKKVSGKYSLFNDKNFSDKQYFEKFPTIFHLRKYLMEEHGKVDIRYYFLAINQMMKRRGHFLIDGQISHVTDDKPLKQQLILLINDLLKIELEEEFMDSIFEILADVNEKKTEKKNILKELINAQDFNKQEGKILYSIFESIVTGKAKIKNIISDEDILEKIKEDNKEDFVLTGDSYEENLQYFEEVLQENITLFNTLKSAYDFVILQSILKGKSTLSDAQVERYDEHKKDLEILKKVIKKYDEDGKLFKQVFKEDNGNGYVSYIGYYLNKNKKITAKKKISNIEFTKYVKGILEKQCDCEDEDVKYLLGKIEQENFLLKQISSINSVIPHQIHLFELDKILENLAKYYPSFNNKKEEFTKIEKIRKTFTFRIPYYVGPLNDYHKNNGGNAWIFRNKGEKIRPWNFEKIVDLHKSEEEFIKRMLNQCTYLPEETVLPKSSILYSEYMVLNELNNLRINGKPIDTDVKLKLIEELFKKKTKVTLKSIRDYMIRNNFADKEDFDNSEKNLEIVSNMKSYIDFNNILGDKFELEMVEDLIEKITIHTGNKKLLKKYIEETYPDLSSSQIQKIINLKYKDWGRLSRKLLDGITGTNIETGEIDTVINFLRNSSDNLMQIIGSQNYSFNNDIDKLRKKYIPQEISYEVVENLYVSPSVKKMIWQVIRITEEITKVMGYDPDKIFIEMAKSEEGKKTTISRKNKLLALYKAIKKDERDSQYEKLLTGLNKLDDSDLRSRKLYLYYTQMGRDMYTGEKIDLDKLFDSTHYDKDHIIPQSMKKDDSIINNLVLVNKNANQTTKGNIYPVPSSIRNNPKIYNYWKYLMEKEFISKEKYNRLIRNTPLTNEELGGFINRQLVETRQSTKAIKELFEKFYKKSKIIPVKAILASDLRKDMNTLKSREVNDLHHAHDAFLNIVAGDVWNREFTSNPINYVKENREGDKVKYSLSKYFTRPRKSKGKVIWTPEKGRKLIVDTLNKPSVLISNESHVKKGELFNATIAGKKDYKKGKIYLPLKKDDRLQDVSKYGGYKAINGAFFFLVEHTKSKKRIRSIELFPLHLLSKFYEDKNTVLDYAINVLQLQDPKIIIDKINYRTEIIIDNFSYLISTKSNDGSITVKPNEQMYWRVDEISNLKKIENKYKKDAILTEEDRKIMESYIDKIYQQFKAGKYKNRRTTDTIIEKYEIIDLDTLDNKQLYQLLVAFISLSYKTSNNAVDFTVIGLGTECGKPRITNLPDNTYLVYKSITGIYEKRIRIK

SEQ ID NO: 223 - protein, 1352 aa, Megasphaera sp.
MKKRNREEYYVGLDIGTSSVGWAVATPDYRIPKFRGHKMWGSRLFAEGKRAAERRQFRTNRRRLARRRDRLQILEELFAEEMAKVDNTFFMRLKESKFFLEDKTVKEKHILFSTDKFDADRFYKDNPTIYHVRKRLMEEEPQDIRELFLAVHHILKYRGHFLFAGSLEQNGASIEELVRTLLGKQGLAILDDTIDSNEMVNILKNTGETKSDRKKDVQELWNPLKDKVKKAQAAEMAGLVLGLKSDISKLFANSDYKDLDSSIKNINFSSGDYEEKRDDYANSIGDDIVLLDTMKALYDTLILSQILQGKRSISAAKVEDYNTHKEQLRALKAILKPHKRLYNEMFRENNKKDLSNYVAYISSYSEGKRVNREGFYKYVQAVLKQVDDSDSKQAILEAIRLETFLPLLRVKDNAVIPHQIHQAELEAILETARKKYNFLNDVSDGVSVKDKIIQLFTFRIPYYVGPLNPHSGETVADRKQGTGWVVRKQRGKVYPWNFADMVDVKASAEAFITNLTNKCTYLIGEDVLPKRSLLYSEFMLLNELNMIKYDGHELPVAIKQLYIEQVFKQEHKKQTKGRVLDFLKRNGLITGSATAVITGMDDAIKGDLQSYRDMVRIFGAGFDHSMAERIIRWVTLFGEAKDILENKIREVYGNSISDSQMRAIKKLKYADWGRLSQAFLIAVKGCDKSGVERNIITCLRASSQNLMEILSDQGTYIKQIKAWNHQHTTNMMDTLDYQLVDDLYVAPSVKRSIWQSLCIVEELVKIMGQAPKKIFVEVTRTKQAEKTKKDSRKKRLVELYTAIGKEGAAWKKEIEAHQAGDFRRKKLYLYYTQMGRCMYSNEPIAMDALFTSAYDIDHIYPQSLTKDGSWDNLVLVKSQLNKEKSDQYPLRPAIREKNKAHWQYLCRAGFISEKKYERLMRTTELTAEELSGFIARQLVETSQATKAVTGLLERIYTNTEICFVKAETVSQFRHQHNFIKIRELNNYHHAKDAYLNIVVGNVYHEKFTKNPWEFIARSTERRPYNLNRMYDFDLLKQGRVIWQVPKSLETVQAMMKSNDVRITKKLLVQKGELYDATITKAHKAKEGTYFPLKGADARLRDVHRYGGYEKIKIAYYSVFSCREKASNTIHTLIIPIPVYKAGLLQTEADLTAYAWQTKQKTKPIKDIYSAITPIYKKLCINTVVKIDGFKYFLGGKTGDYMWLDPAIPVVLDEQAAAYLKAISKVGRADDVENTAQAIDLITAEANEAFYDVLLKKMEAKIFAKAYQTIVEKLASETARERFRELSIGAQCSCLLEILNLLANNKTTFTFFKDKMGVTMSRRKQPMDLTKLEECIVYETSITGLYEKAVSLL

SEQ ID NO: 224 - protein, 650 aa, Haemophilus pittmaniae
MENKNLHYILGLDLGIASVGWAVVEIDKEENPLCLIDVGVRTFERAEVPKTGESLALSRRLARSARRLTQRRVARLKKAKRLLKLENILLSTDERLPHQVWQLRVEGLDRKLKRQEWAAVLLHLIKHRGYLSQRKNESKSENKELGALLSGVASNHELLQQTTYRTPAELAVKKFEVEEGHIRNQQGAYTHTFSRLDLLAEMELLFSRQQHFGNPFASEKLLENLTALLMWQKPALSGEAILKMLGKCTFEDEYKAAKNTYTAERFVWITKLNNLRIQENGLERALNDNERLILIEQPYEKAKLTYAQVRSILNLSDEAIFKGLRYSGEDKKAIETKTTLMEMKAYHQIRKVLEGNNLKAEWTELKENSTLLDEIGTAFSLYKTDEDISTYLAGKLSQPVLNALLENLSFDKFIQLSLKALYKLLPLMQQGLRYDEACHEMYGDHYGKKTYGKKTEENHYFLPQIPADEIRNPVVLRTLTQARKVINGVVRLYGSPARIHIETGREVGKSYKDRRELEKRQEENRKQRENAIKEFKEYFPHFAGEPKAKDILKMRLYKQQNAKCLYSGKPIELHRLLEKGYVEVDHALPFSRTWDDSFNNKVLVLANENQNKGNLTPFEWLDGKHNSERWRAFKALVETSAFPYAKNNAS

SEQ ID NO: 225 - protein, 1062 aa, Ralstonia syzygii
MAEKQHRWGLDIGTNSIGWAVIALIEGRPAGLVATGSRIFSDGRNPKDGSSLAVERRGPRQMRRRRDRYLRRRDRFMQALINVGLMPGDAAARKALVTENPYVLRQRGLDQALTLPEFGRALFHLNQRRGFQSNRKTDRATAKESGKVKNAIAAFRAGMGNARTVGEALARRLEDGRPVRARMVGQGKDEHYELYIAREWIAQEFDALWASQQRFHAEVLADAARDRLRAILLFQRKLLPVPVGKCFLEPNQPRVAAALPSAQRFRLMQELNHLRVMTLADKRERPLSFQERNDLLAQLVARPKCGFDMLRKIVFGANKEAYRFTIESERRKELKGCDTAAKLAKVNALGTRWQALSLDEQDRLVCLLLDGENDAVLADALREHYGLTDAQIDTLLGLSFEDGHMRLGRSALLRVLDALESGRDEQGLPLSYDKAVVAAGYPAHTADLENGERDALPYYGELLWRYTQDAPTAKNDAERKFGKIANPTVHIGLNQLRKLVNALIQRYGKPAQIVVELARNLKAGLEEKERIKKQQTANLERNERIRQKLQDAGVPDNRENRLRMRLFEELGQGNGLGTPCIYSGRQISLQRLFSNDVQVDHILPFSKTLDDSFANKVLAQHDANRYKGNRGPFEAFGANRDGYAWDDIRARAAVLPRNKRNRFAETAMQDWLHNETDFLARQLTDTAYLSRVARQYLTAICSKDDVYVSPGRLTAMLRAKWGLNRVLDGVMEEQGRPAVKNRDDHRHHAIDAVVIGATDRAMLQQVATLAARAREQDAERLIGDMPTPWPNFLEDVRAAVARCVVSHKPDHGPEGGLHNDTAYGIVAGPFEDGRYRVRHRVSLFDLKPGDLSNVRCDAPLQAELEPIFEQDDARAREVALTALAERYRQRKVWLEELMSVLPIRPRGEDGKTLPDSAPYKAYKGDSNYCYELFINERGRWDGELISTFRANQAAYRRFRNDPARFRRYTAGGRPLLMRLCINDYIAVGTAAERTIFRVVKMSENKITLAEHFEGGTLKQRDADKDDPFKYLTKSPGALRDLGARRIFVDLIGRVLDPGIKGD

SEQ ID NO: 226 - protein, 1052 aa, Haemophilus parainfluenzae
MENKNLHYILGLDLGIASVGWAVVEIDEKENPLRLIDVGVRTFERAETQKGESLALSRRSARSARRLTQRRVARLKKAKRLLKSENILLSTDERLPHQVWQLRVEGLDRKLERQEWAAVLLHLIKHRGYLSQRKNESKSENKELGALLSGVASNHELLQQATYRTPAELAVKKFEVEEGHIRNQQGAYTHTFSRLDLLAEMELLFSRQQHFGNPFASEKLLENLTALLMWQKPALSGEDILKMLGKCTFEDEYKAAKNTYTAERFVWITKLNNLRIQENGLERALSDNERLMLIEQPYEKAKLTYAQVRSILNLSDDAIFKGVRYSGEDKKAIETKTTLMEMKAYHQIRKVLEGNNLKAEWVALKANPTLLDEIGTAFSLYKTDEDISAYLAGKLSQPVLNALLENLSFDKFIQLSLKALYKLLPLMQQGLRYDEACREIYGDHYGKKTEETHHFLPQIPADEIRNPVVLRTLTQARKVINGVVRLYGSPARIHIETGREVGKSYKDRHELKKRQEENRKQREKTISEIKTLFPNFSGEPKGKDILKMRLYYQQNAKCLYSGKPLELHRLFEQKYVEVDHALPLSRTWDDSFNNKVLVLANENQNKGNLTPFEWLDGKNNSERWRTFKALVETSAFPYAKKQRILSQKLDEKGFIERNLNDTRYVARFLCNFIADNMHLTGEGKRKVFASNGQITALLRRRWGLAKSREDNDRHHALDAVLVACSTVAMQQKITRFVRFKAGDVFTGERIDRETGEIIPLHFPTPWQFFKQEVEIRIFSDNPKLELENRLPDRPQANHEFVQPLFVSRMPTRKMTGQGHMETVKSAKRLNEGISMIKMPLTKLKLKDLELMVNREREKDLYDALKTRLEAFNDDPAKAFAEPFMKKGGAIVKSVRVEQVQKSGVLVRQGNGVADNASMVRVDVFTKDGKYFLVPIYTWQVAKGILPNKAVIQGKDEEDWEDIDDATFQFSLHPNDLISVKTKKDEFLGYFNGLNRHTGGINIRTHDLEKSKGKQGIFEGIGVKIALSFEKYQIDELGKNIRLCKPSKRQPVR

SEQ ID NO: 227 - protein, 1331 aa, Lactobacillus sanfranciscensis
MNKQPYNIGLDIGTSSVGWSATELDNRLLHIKGHNGIGVRLFKEGESAADRRGFRTTRRRLARRKWRLRLLNEIFATEIAKVDPSFFARLKQSNVSPKDPNKTMFENILFDDENLDDQKFHHDYKTIYHLRQAIINHPEQKFDIRLIYLAMHHIIKYRGHFLNQANVQDFKGGKIDLEKSFKALNDIFENQGRDLRLVTDKANQYVKVLSDNAKTRSDRKKELSKLLYVPIDKDTDKNSKKVTGEILKAILGNKAKFDVIFGIEVENPKEWVLTFNSDDFDDKIEGLSSQMTDEDSEILLILKELYFALNLSDILNNSVTDKNAKTLSEAMINRYDDHKNQLAMLKKVIDSSDKKHAKELKEAYSAYIDGENNKKISFEDLKKRIQKNLVDSELSQKINDLLDHDYFLPKQRSKENGAIPHQLQQQELDQIIESQKQYYPFLAELNPNEKRSRQAKYKLDELVAFRVPYYVGPMVEVTDSNQENNGKFAWMIRKEQGEITPWNFDEKVDRTETATKFITRMTTTDTYLIGEPVLPKNSLLYQKFVVLNELNNLKINQEIITPGQKQYLYEHVMKKNKRVTLKKIADALVIKGDYPYAPEVKGTTDQKNLNNGLTTYIDLAKIFGNELDDVDREADFEKIIEWSTIFEDQHIFALKLQELKWLTEKQRNQVVKLRYQGWGKLSKELLAGLVDDNGQRIIDLLWSDNQNFMQIVNQKSFKESIADHNGAHLEEKNLKDVINDLYTSPQNKKAIRQVILVVDDIINAVGYEPANIMMEFAREDSNDHRLTNSRSRQLENVYKDITNSWFDNDSVKDELEDKIKNKDKFTDRLYLYFTQGGKDLYTGEPLNIDDLSSYDIDHILPQSFILDNSLDNRVLTSQRNNRVSKEDQLPGELFGTKMHAFWKRLKAAHLISNKKYYNLTLTPNSISKFNNQGRFINRQLVETRQVIKLAAEILHNRYSEEKGTNIVTIKANLTHHMREKFNFYKNRNVNDYHHAFDAYLTAFVGNWLLQQYPKLKPYFVYGDFAKTEINNLKSFNMLYKFEQAHQLNEKDGKIAKDADALLGYMKNVYHFKKMLVTKKLETNHGALFKQTLYPSPAHDIKKRQLIKPKDNRPTDIYGGYTHEERKYMSLVKVIGKKDNEYRMANVPLLKINKNNDIKEILKSQFSNKKFEIVLPKVLKNQLFSENGALFVIGSKGYKYNANQLVLSDLDMKLLNDLSNNKSIDEVTINQLFKNIVDSTNKYMPLYEIKNLNEVVEKFNNLEFNDKKKTITDFLLATHANPTMSNLKNIGLPSYFGRFTSGNAGIKLSENANVIYQSPTGLFSRKVKISDF

SEQ ID NO: 228 - protein, 1473 aa, Flavobacterium branchiophilum
MAKILGLDLGTNSIGWAVVERENIDFSLIDKGVRIFSEGVKSEKGIESSRAAERTGYRSARKIKYRRKLRKYETLKVLSLNRMCPLSIEEVEEWKKSGFKDYPLNPEFLKWLSTDEESNVNPYFFRDRASKHKVSLFELGRAFYHIAQRRGFLSNRLDQSAEGILEEHCPKIEAIVEDLISIDEISTNITDYFFETGILDSNEKNGYAKDLDEGDKKLVSLYKSLLAILKKNESDFENCKSEIIERLNKKDVLGKVKGKIKDISQAMLDGNYKTLGQYFYSLYSKEKIRNQYTSREEHYLSEFITICKVQGIDQINEEEKINEKKFDGLAKDLYKAIFFQRPLKSQKGLIGKCSFEKSKSRCAISHPDFEEYRMWTYLNTIKIGTQSDKKLRFLTQDEKLKLVPKFYRKNDFNFDVLAKELIEKGSSFGFYKSSKKNDFFYWFNYKPTDTVAACQVAASLKNAIGEDWKTKSFKYQTINSNKEQVSRTVDYKDLWHLLTVATSDVYLYEFAIDKLGLDEKNAKAFSKTKLKKDFASLSLSAINKILPYLKEGLLYSHAVFVANIENIVDENIWKDEKQRDYIKTQISEIIENYTLEKSRFEIINGLLKEYKSENEDGKRVYYSKEAEQSFENDLKKKLVLFYKSNEIENKEQQETIFNELLPIFIQQLKDYEFIKIQRLDQKVLIFLKGKNETGQIFCTEEKGTAEEKEKKIKNRLKKLYHPSDIEKFKKKIIKDEFGNEKIVLGSPLTPSIKNPMAMRALHQLRKVLNALILEGQIDEKTIIHIEMARELNDANKRKGIQDYQNDNKKFREDAIKEIKKLYFEDCKKEVEPTEDDILRYQLWMEQNRSEIYEEGKNISICDIIGSNPAYDIEHTIPRSRSQDNSQMNKTLCSQRFNREVKKQSMPIELNNHLEILPRIAHWKEEADNLTREIEIISRSIKAAATKEIKDKKIRRRHYLTLKRDYLQGKYDRFIWEEPKVGFKNSQIPDTGIITKYAQAYLKSYFKKVESVKGGMVAEFRKIWGIQESFIDENGMKHYKVKDRSKHTHHTIDAITIACMTKEKYDVLAHAWTLEDQQNKKEARSIIEASKPWKTFKEDLLKIEEEILVSHYTPDNVKKQAKKIVRVRGKKQFVAEVERDVNGKAVPKKAASGKTIYKLDGEGKKLPRLQQGDTIRGSLHQDSIYGAIKNPLNTDEIKYVIRKDLESIKGSDVESIVDEVVKEKIKEAIANKVLLLSSNAQQKNKLVGTVWMNEEKRIAINKVRIYANSVKNPLHIKEHSLLSKSKHVHKQKVYGQNDENYAMAIYELDGKRDFELINIFNLAKLIKQGQGFYPLHKKKEIKGKIVFVPIEKRNKRDVVLKRGQQVVFYDKEVENPKDISEIVDFKGRIYIIEGLSIQRIVRPSGKVDEYGVIMLRYFKEARKADDIKQDNFKPDGVFKLGENKPTRKMNHNQFTAFVEGIDFKVLPSGKFEKI

SEQ ID NO: 229 - protein, 933 aa, Mycoplasma iowae
SVRDYSDGPGSEKSPTPYGLWRLNKEGKVEKIGENLWDVLVGKCTIYGNDDSIKDEKTKLRGGKNSPIAEVFNFINDLTNIYLFSSSKLKLNSKTKLSILDEFNISLKTSKPIKSFSEKKLVKHIISTTEFKDINFDDVYGYRIDTSKKPLFTKLENTITIAKWLLDNNVYNELNIYDQEDLIKINNIFVILQKSMDINKRAQLVSDEYKIDLPICLELVKKIKGVMQTHSFSYKAMLEYIPVGIKYNDLETGEDTSINASTYFVDKINNLNTKLLFNGRPRKYIPKNIFEDGIISPTSKRAFIQTINVLNKIIKVYSKDYDIDNIAIELPRDKNTAEERKKISSNQKKAGEEIAEVLKFAGLNVEEYTSKLNSKTKLKLKLLKEQNYKDIYDGQEIDVIDVIKNSNKYHEEHIIPYSLCFIDSRRNKVLTKFENNKQKGNKTPFQWLSSIGKYAEFKDRVEKLFVEQKISKAKKELLLFEQDPRTEMLGFIEKNLSDTRYASKLVFDTFRDFFKVNNPNVKIKVINGALTNYARYNLFATYKDGLLERKGIMKQREFYEHHGIDATILAFLGSNHKINQLLKLSHKFKKQDDNKIYDENTGELIEFTKDFLSDEARKKAMELSKQIFEIPCKFSRPIYRKSNVSFSNETLISMKWIDDKYTKGVKINKLSLVNKDLDLNEYFADYETNEMKNLICYQEDKTLYNKLKNIYDKYNNFVENSNIKPVKNPFINYMISNFSSDDSKIQNFKHIIFYDHKGNKKFVKSLKVCGDEKNLSNIVLRKDQKDIMNSKKIKKSGILESLNPISARIYKDNKGKYITIPINSLVLNWTKKGLEIDNEKLCNILKSKNIFNNQFIEINAGQSIINNENKLFYFVGGGDFKVNKLEIKSQFCDNEIFFPRKQMNISIATIIDNYKLCEVDELGKIYNIRKIVL

SEQ ID NO: 230 - protein, 1358 aa, Acidaminococcus intestini; identical to SEQ ID NO: 94

SEQ ID NO: 231 - protein, 983 aa, Campylobacter jejuni
MARILAFDIGISSIGWAFSENDELKDCGVRIFTKAENPKTGESLALPRRLARSARKRLARRKARLNHLKHLIANEFKLNYEDYQSFDESLAKAYKGSLISPYELRFRALNELLSKQDFARVILHIAKRRGYDDIKNSDDKEKGAILKAIKQNEEKLANYQSVGEYLYKEYFQKFKENSKEFTNVRNKKESYERCIAQSFLKDELKLIFKKQREFGFSFSKKFEEEVLSVAFYKRALKDFSHLVGNCSFFTDEKRAPKNSPLAFMFVALTRIINLLNNLKNTEGILYTKDDLNALLNEVLKNGTLTYKQTKKLLGLSDDYEFKGEKGTYFIEFKKYKEFIKALGEHNLSQDDLNEIAKDITLIKDEIKLKKALAKYDLNQNQIDSLSKLEFKDHLNISFKALKLVTPLMLEGKKYDEACNELNLKVAINEDKKDFLPAFNETYYKDEVTNPVVLRAIKEYRKVLNALLKKYGKVHKINIELAREVGKNHSQRAKIEKEQNENYKAKKDAELECEKLGLKINSKNILKLRLFKEQKEFCAYSGEKIKISDLQDEKMLEIDHIYPYSRSFDDSYMNKVLVFTKQNQEKLNQTPFEAFGNDSAKWQKIEVLAKNLPTKKQKRILDKNYKDKEQKNFKDRNLNDTRYIARLVLNYTKDYLDFLPLSDDENTKLNDTQKGSKVHVEAKSGMLTSALRHTWGFSAKDRNNHLHHAIDAVIIAYANNSIVKAFSDFKKEQESNSAELYAKKISELDYKNKRKFFEPFSGFRQKVLDKIDEIFVSKPERKKPSGALHEETFRKEEFYQSYGGKEGVLKALELGKIRKVNGKIVKNGDMFRVDIFKHKKTNKFYAVPIYTMDFALKVLPNKAVARSKKGEIKDWILMDENYEFCFSLYKDSLILIQTKDMQEPEFVYYNAFTSSTVSLIVSKHDNKFETLSKNQKILFKNANEKEVIAKSIGIQNLKVFEKYIVSALGEVTKAEFRQREDFKK

SEQ ID NO: 232 - protein, 1338 aa, Streptococcus macacae
MTKPYSIGLDIGTNSVGWAVVTDGYKVPAKKMKVLGNTDKSHIKKNLLGALLFDSGNTAKDRRLKRTARRRYTRRRNRILYLQEIFAEEMAKADESFFQRLNESFLTNDDKEFDSHPIFGNKAEEEAHHHKFPTIFHLRKHLADSTEKSDLRLIYLALAHMIKFRGHFLIEGQLKAENTNVQTLFDDFVEVYDKTVEESHLSEISVSSILTEKISKSRRLENLIKYYPTEKKNTLFGNLIALSLGLQPNFKTNFKLSEDAKLQFSKDTYEEDLGELLGKIGDNYADLFISAKNLYDAILLSGILTIDDNTTKAPLSASMIKRYEEHQEDLAQLKKFIRQNLPDQYSEVFSDKTKDGYAGYIDGKTNQEAFYKYIKNMLSKTEGADYFLDKIDREDFLRKQRTFDNGSVPHQIHLQEMHAILRRQGEYYPFLKENQDKIEKILTFRIPYYVGPLARKGSRFAWAEYKADKKVTPWNFDDILDKEKSAEEFITRMTLNDLYLPEEKVLPKHSLVYETFNVYNELTKVKYVNEQGKAIFFDANMKQEIFDHVFKENRKVTKDKLLNYLNKEFEEFRIVNLTGLDKENKAFNSSLGTYHDLRKILDKSFLDDKVNEKIIEDIIQTLTLFEDREMIRQRLQKYSDIFTTQQLKKLERRHYTGWGRLSAKLINGIRDKQSNKTILGYLIDDGYSNRNFMQLINDDSLPFKEEIARAQVIGETDDLNQLVSDIAGSPAIKKGILQSLKIVDELVKVMGHNPANIVIEMARENQTTAKGRRSSQQRYKRLEEAIKNLDHDLNHKILKEHPTDNQALQNDRLFLYYLQNGRDMYTEDPLDINRLSDYDIDHIIPQSFIKDDSIDNKVLVSSAKNRGKSDNVPSEDVVNRMRPFWNKLLSCGLISQRKYSNLTKKELKPDDKAGFIKRQLVETRQITKHVAQILDARFNTKRDENKKVIRDVKIITLKSNLVSQFRKDFKFYKVREINDYHHAHDAYLNAVIGKALLDVYPQLEPEFVYGEYPHFHGYKENKATAKKFFYSNIMNFFKKDDIRTDENGEIVWKKDEHISNIKRVLSYPQVNIVKKVEIQTVGQNGGLFDDNPKSPLEVTPSKLVPLKKELNPKKYGGYQKPTTAYPVLLITDTKQLIPISVMNKKQFEQNPVKFLRDRGYQQVGKNDFIKLPKYTLVDIGDGIKRLWASSKEIHKGNQLVVSKKSQILLYHAHHLDSDLSNDYLQNHNQQFDVLFNEIISFSKKCKLGKEHIQKIENVYSNKKNSASIEELAESFIKLLGFTQLGATSPFNFLGVKLNQKQYKGKKDYILPCTEGTLIRQSITGLYETRVDLSKIGED

SEQ ID NO: 233 - protein, 1265 aa, Mycoplasma ovipneumoniae
MHNKKNITIGFDLGIASIGWAIIDSTTSKILDWGTRTFEERKTANERRAFRSTRRNIRRKAYRNQRFINLILKYKDLFELKNISDIQRANKKDTENYEKIISFFTEIYKKCAAKHSNILEVKVKALDSKIEKLDLIWILHDYLENRGFFYDLEEENVADKYEGIEHPSILLYDFFKKNGFFKSNSSIPKDLGGYSFSNLQWVNEIKKLFEVQEINPEFSEKFLNLFTSVRDYAKGPGSEHSASEYGIFQKDEKGKVFKKYDNIWDKTIGKCSFFVEENRSPVNYPSYEIFNLLNQLINLSTDLKTTNKKIWQLSSNDRNELLDELLKVKEKAKIISISLKKNEIKKIILKDFGFEKSDIDDQDTIEGRKIIKEEPTTKLEVTKHLLATIYSHSSDSNWININNILEFLPYLDAICIILDREKSRGQDEVLKKLTEKNIFEVLKIDREKQLDFVKSIFSNTKFNFKKIGNFSLKAIREFLPKMFEQNKNSEYLKWKDEEIRRKWEEQKSKLGKTDKKTKYLNPRIFQDEIISPGTKNTFEQAVLVLNQIIKKYSKENIIDAIIIESPREKNDKKTIEEIKKRNKKGKGKTLEKLFQILNLENKGYKLSDLETKPAKLLDRLRFYHQQDGIDLYTLDKINIDQLINGSQKYEIEHIIPYSMSYDNSQANKILTEKAENLKKGKLIASEYIKRNGDEFYNKYYEKAKELFINKYKKNKKLDSYVDLDEDSAKNRFRFLTLQDYDEFQVEFLARNLNDTRYSTKLFYHALVEHFENNEFFTYIDENSSKHKVKISTIKGHVTKYFRAKPVQKNNGPNENLNNNKPEKIEKNRENNEHHAVDAAIVAIIGNKNPQIANLLTLADNKTDKKFLLHDENYKENIETGELVKIPKFEVDKLAKVEDLKKIIQEKYEEAKKHTAIKFSRKTRTILNGGLSDETLYGFKYDEKEDKYFKIIKKKLVTSKNEELKKYFENPFGKKADGKSEYTVLMAQSHLSEFNKLKEIFEKYNGFSNKTGNAFVEYMNDLALKEPTLKAEIESAKSVEKLLYYNFKPSDQFTYHDNINNKSFKRFYKNIRIIEYKSIPIKFKILSKHDGGKSFKDTLFSLYSLVYKVYENGKESYKSIPVTSQMRNFGIDEFDFLDENLYNKEKLDIYKSDFAKPIPVNCKPVFVLKKGSILKKKSLDIDDFKETKETEEGNYYFISTISKRFNRDTAYGLKPLKLSVVKPVAEPSTNPIFKEYIPIHLDELGNEYPVKIKEHTDDEKLMCTIK

SEQ ID NO: 234 - protein, 1535 aa, Flavobacterium columnare
MTKILGLDLGTNSIGWAIRDTENEGINQILDKGARIFSEGVKSENGKEISRAAERTAYRSARKIKYRRKLRKYETLKVLSINGMCPLSVEEVEQWKKSGFKEYPLNPEFLDWLRTNEDKNINPYLFRDKASKQKVTLFELGRALYHIAQRRGFLSNRLDQSAEGVFEEHNPQIQNLIEDLDSSNTILNELKEYYINLGIIDETEKSGFKKDLDEGEKKLKSLYNSLVAITKKNANDIETCKQELIARLNKKEDLGKVKGKIKDISQAMLDRNFKTLGQYFFSLYNKERIRNQYTSREEHYLEEFIIICQTQGIEGINTNEKLPEKKFTGLAKDLYRAIFFQRPLKSQKGLIGKCSFEKNKSRCAVSHPDYEEFRMWSYLNTIKIGTQSEKTLRFLTLEEKLKLVPKFYRKSDFNFEVLAKELVEKGASFGYYKSSKKNEFFYWFNYKPTDSVSACVVSASLENAIGKDWKIKTFEYQTRNTEKNEVTKSVDYKDLWHLLSVATSDTYLYDFAIEKLKLEPKNAKAFSKTKLKKDFASLSLAAIAKILPYLKQGLLYSHAVFMANIENIVDADIWKDEEQQKFIQSKIVELVDNYIVEKSKLELINGLLKIYNTEDKEGRKVYYSKEAESLFEADLRKKLVPFYKANIIIEEHEQEIIFQDLFPILMDQLKKQEFIKIGRLDKQIEAFLEGENEEGQIFCNHTDKLKKLYHPSDIEVFKKKTIKDEWGNEKVVLGSPLTTSIKNPMAMRALHQLRKVLNTLIANDQIDEDTRIHIEMARELNDANKRKGIQDFQNENKKFREEAIKEIKKLYLEECHKDVNPTEDDILRYQLWLEQGKCEIYEEGNNISICDIIGSNPSYDIEHTIPRSISQDNSQMNKTLCSLKFNRSIKKQKMPVELSNYNDILPRIAHWKKEAEELTRQIETISRSIKSAATKVAKDKNIRKRHYLTLKRDYILGKYERFTWEEPKVGFKNSQIPDTGIITKYAQAYLKSYFKRVESVKGGAVAEFRKLWGIQESFIDENWWKHYKDKDRDKHTHHTIDAITIACMPKDKYDLLAHAWRLEDEQDKKAAKVLIEQAKPWKTFKEDIEKIETEILVSHFTPDNVKKQSKSIIKNRGKKVYVLKNELPVNFKNKIEGKDYFKLKFDSKILYKIPKKKEKQTDTFYEELPKNYLNGVEGKDYFKINTTGKTFYKIPIFNQGDTIRGSLHQETTYGAIKLPDIDIETKKPLHTDKGGFILKKDIKGNEIVFFVVRKEISKISENDVQNIVDNVVRKKIENAIANSLITFKIVKKKKVAVIKEGVTIWMREPNIEKGIEGIPIKKVRIITNSVKNPIEIKVHSPLSKSRHKHKQKVYGQNDENYAMALYELDGKREFELINNFNLAKLLKQSQSYYPLHKEKEIKGKKILVPIEKRNNKDVILKRGQQVVFYDKTVENPKDISEIIDFRERIYIIEGLTIQRQKDKKTSKVNEYGIIQLRHFKEARKSEEISKDNFKPDGEFKINENKPTRKMNHNQFTAFVEGIDFKVLPSGKFQKI

SEQ ID NO: 235 - protein, 1459 aa, Flavobacterium columnare
MKFNLGLDIGTNSIGWALVNEDYENKKGKIIAAGSRIIPMTQDILDKFGSGAITETQTALRTDYRSKRKLIQRFLLRRERLHRVLNVLDFLPKHYAESIDFEKYFGKFLPNTEPKLAYNQNQFIFQNSFLEMLKEFQEKHPELLTNNKKIPYDWTIYYLRKKALNQRIEKEELAWLLLQFNQKRGYNQLRDEEEESVPNKQVEFYSLKIIDVVADQPKEGRDKRWYSINLENGWTYRRESKTPLFNWEGKTKDFIVTTDLNQDGSIKKDKEGKEKRSFRAPSEGDWTLLKKKTEKEIYESGKTLGTYIYDALLNTPDLKIKGDFIRTIDRSIYKEELQQIINKQKEYHLELNSSKLYKACLEELYPKNEIYKSALKNKDIAYLFINDILYYQRPLKAPKYNIGKCTYESRTFKKEDKKIREYIPAVAKSHPLFQEFRLWQWIKNLKIYEKLSSDNCTDFFLTNEQDFENLFEFLWNKKEIDHKGILEYLVKTKFPDLKPKQVKTKVKEYRWNYVYDHEKDESKTYPCGETYFLLKNKLDKIYNAQDDFLDKERLYNLWHIIYSVTDKKQYEKALAKFALKNHLDTKSFVNTFKRIPPFKNDYAIYSLKAIKKLLPLMRVGKYWNYDDIDPITKQKIQCIITGEENDTISTLVREKTNHFSNENDFKNLPLWLAGYIVYNSHNESSEIEKWKSPQDIDTFLKKFKQHALRNPIVEQVVTETLRVVRDIWSKKGQGKKDFFNEIHIELGKDLKNPVDKRRKLSSTNTKNESTNTRIKALLIELFTQGVENVKPNSPKHQEILKIFEEGALNSGIEIEEDIIKISNTDQPTKKQLELYILWLEHKYKSPYTGQSIPLSKLFTPNYEIEHIIPRSKYYDDNLSNKVICETEINRLKNNQLGYEFINNHEIREVTLEEGKTIRLLSPEQYWNFVTTYYAKNKAKRENLLLKELPVQMVEKQLNDTRYVSKYVMQLLSKIVRKEDGTDNGINSTNILSISGKMTRALKNDWDLNDVWNDLLLYRFERLNTITKTNLFTTYSEQKQKRMPIVPDQYAKGFHKKRLDHRHHALDAIVIACITRNHINYMNNQNIQGEKLKKNAIEKENYREILQKSRLDIRAQLCEKKYNDNDPTKYNWVFIKPWADFTENTKDILESIIPSFKQNLRIINKTVNYYEKYNENGKKVKVRQIKGDNWAIRKPLHKETISGKVHLSYKTPAKGKILTATRKVLDSSMDFKSIEKITDTGIQKILKNYLEYKKSPELAFSPEGIEELNATITKYNNGFHHKPIYKVRIYEEGVKFPLGNKGNKKSKYVEAEKGTNLFFAIYKDQENNRYFETIPFNDVLETLKKGMSAVPEKNQEENTLVFALSPQDLVFVPTLDEIENPDIVDFKNLTKDQTNRIYKMVSSSGKQCFFIKAEVATSIVNKMEFSTSNKMENSIEGIQIKSNCWKLKLDRLGTITRVIK

SEQ ID NO: 236 - protein, 1389 aa, Oenococcus kitaharae
MARDYSVGLDIGTSSVGWAAIDNKYHLIRAKSKNLIGVRLFDSAVTAEKRRGYRTTRRRLSRRHWRLRLLNDIFAGPLTDFGDENFLARLKYSWVHPQDQSNQAHFAAGLLFDSKEQDKDFYRKYPTIYHLRLALMNDDQKHDLREVYLAIHHLVKYRGHFLIEGDVKADSAFDVHTFADAIQRYAESNNSDENLLGKIDEKKLSAALTDKHGSKSQRAETAETAFDILDLQSKKQIQAILKSVVGNQANLMAIFGLDSSAISKDEQKNYKFSFDDADIDEKIADSEALLSDTEFEFLCDLKAAFDGLTLKMLLGDDKTVSAAMVRRFNEHQKDWEYIKSHIRNAKNAGNGLYEKSKKFDGINAAYLALQSDNEDDRKKAKKIFQDEISSADIPDDVKADFLKKIDDDQFLPIQRTKNNGTIPHQLHRNELEQIIEKQGIYYPFLKDTYQENSHELNKITALINFRVPYYVGPLVEEEQKIADDGKNIPDPTNHWMVRKSNDTITPWNLSQVVDLDKSGRRFIERLTGTDTYLIGEPTLPKNSLLYQKFDVLQELNNIRVSGRRLDIRAKQDAFEHLFKVQKTVSATNLKDFLVQAGYISEDTQIEGLADVNGKNFNNALTTYNYLVSVLGREFVENPSNEELLEEITELQTVFEDKKVLRRQLDQLDGLSDHNREKLSRKHYTGWGRISKKLLTTKIVQNADKIDNQTFDVPRMNQSIIDTLYNTKMNLMEIINNAEDDFGVRAWIDKQNTTDGDEQDVYSLIDELAGPKEIKRGIVQSFRILDDITKAVGYAPKRVYLEFARKTQESHLTNSRKNQLSTLLKNAGLSELVTQVSQYDAAALQNDRLYLYFLQQGKDMYSGEKLNLDNLSNYDIDHIIPQAYTKDNSLDNRVLVSNITNRRKSDSSNYLPALIDKMRPFWSVLSKQGLLSKHKFANLTRTRDFDDMEKERFIARSLVETRQIIKNVASLIDSHFGGETKAVAIRSSLTADMRRYVDIPKNRDINDYHHAFDALLFSTVGQYTENSGLMKKGQLSDSAGNQYNRYIKEWIHAARLNAQSQRVNPFGFVVGSMRNAAPGKLNPETGEITPEENADWSIADLDYLHKVMNFRKITVTRRLKDQKGQLYDESRYPSVLHDAKSKASINFDKHKPVDLYGGFSSAKPAYAALIKFKNKFRLVNVLRQWTYSDKNSEDYILEQIRGKYPKAEMVLSHIPYGQLVKKDGALVTISSATELHNFEQLWLPLADYKLINTLLKTKEDNLVDILHNRLDLPEMTIESAFYKAFDSILSFAFNRYALHQNALVKLQAHRDDFNALNYEDKQQTLERILDALHASPASSDLKKINLSSGFGRLFSPSHFTLADTDEFIFQSVTGLFSTQKTVAQLYQETK

SEQ ID NO: 237 - protein, 1425 aa, Prevotella micans
MIQKIFGLDLGTNSIGSSVRNLELGENLTEQLEFFSSDIFGSSVSKNSNGREYSLAGNRSAHRRSRGLNEARRRKLWATLDLLIEHGLCPMSPDSLMQWRTYDKQKGLYRQYPIEDKDFNAWIMLDFNGDGKPDYSSPYQLRRELVVRQFDFDQPIERYKLGRALYHIAQHRGFKSSKGETIADQEKNEKKPIAEEGADIANEMKASETKLSKGLVAYMQENHLKTVGEAFAKLEDERVRIRNNESYRAIRSQYQDEIKEIFTYQKKLSVESELYERLTSEKKGVGTIFYKRPLRSQRGNVGKCTLERNKPRCPIGRPEFEEFRAWTLINNIKIRETAGEPYKQLPIKLRQELLKDCFLSKVKADFKFEDIRKYIEKRLGLSFSNDDKTINYKDSVSIAACPVTVRMKKLLGENWANCRIDGEKRRQAHGKNNNNEHIVSYTEEDIWHVCYNAEDPEEVSNFARKALHWDENKIKELVRLWTSIPQGYAMLSLKAIRNINRMLLLGLKYSDAVLLAKLPDIVPVSDEDILAITKEFLQLEDKLNQEKQINNIVNSLIANYKSKLEENRFADHNYQYQLGEGDDEDINTQIKSHIGAKLWVQIGADEQTKIFQAVRSKYQDFFKSYKRKFVESPKLGELLVAFLTEKFPNVKSKQWERLYHPSQIAIYRPIPVDNDRSKLRLGNPNIGAIKNPTVMRVLNTLRRRVNQLLDDGVISPDETRVVVETARELNDANTKWALDRYNRIRRDENEKIRKILKELNPTTNSISEQDIDKARYIFEQCETDFYTDGKVPYYNKDIKKYKLWLEQGGQCLYTGQTINLTNLFNPNAFDMEHTIPKSISFDNSDQNLTLCESYYNRFIKKNNIPTDMPNYDKDVTINGKEYTAIKPRLQRWKERVDRLSRNVDFWKGQARRAQDKDRKDECIREKHLWDMELAYWKGKLERFTMTDVTDGFKNSQLVDTRVITRHAVLYLKSIFNHVEVQRGETTAEFRKILGLQSIDEKKDRSLHSHHAIDATMLTVIPSAAKRDRMLELFYKIEETKKALKNYNDNNKTGLNLELKGLEEKLDKEKKDCRVGRRVNDLDRFINENIIVSHHTKDQALTPAHRRLRKRGKIVGGKEHPRWQTGDSLRGEIHKASYYGAITQFAKDANGKVLMKDGQAQIDPTIYYVIRRELKYKRSTQDSGFTNWEDLEKVIVDTDLFGLMKGQFPEGTSFKDACEQGFYMIKKGKNGEGDVKTHRIRHVRCKAVKTALRIKEQTYKSSKDYKQFFYAAVGDLYVMCYYTDGKKRDFKIYSLYDISNHRKSGTEDIPKFITDKKGNHLPLDYKLRTGDMVLLYKDNPEELKDLDQVNLKRRLYKVNRFESEGLIILLTHHLSTTTERGCSIGKIENYQNLPTAIRCGIKTIKFLIMGKHRDFVIRNGNIEFKH

SEQ ID NO: 238 - protein, 1473 aa, Mucilaginibacter paludis
MKNILGLDLGTNSIGWALIEKDTDQKNGNILGTGSRIIPMSQDIKDEFGKGNSISQTADRTKFRSVRRLRERHLLRRERLHRVLNVLGFLPKHYADQIDFKKRLGKLVNETEPKLVYDNKNFIFKKSFEAMLSDFNQHQPLLLADGKKVPFDWTIYYLRKKALTEKIEKEELAWLILNFNQKRGYYQLRGEEEEENPNKMVAFHSLKIVEVIADESQKGKAETWYSLILENGWIYRRSSKTPLYDWKGKQRDFIVTTDLNDDGSIKTDKEGLEKRSFRAPVEDDWTLVKKKTEQEINRSHKTVGTYIYENLLQDPKQKIKGKLVRTIEREFYKDELKMILKNQQKFHPELNDEHLYINCVRELYRNNQAHQTILSKKDFVHLFIDDIIFYQRPLRSQKSSISNCTLEFRKYKNENGTDQTDYLKAIPKSHPLFQEFRLWQWIYNLGIYQKEDDTNVTDELIKNIDGYQDLFDFLNNKKEIRQDILIKFLVEQTGLKGKPLSSVVAKYRWNFVEDKIYPCNETGTQIRTRLAKVENTPEDFLTAETEIKLWHIIYSVNDKADYEKALKTFAEKHNLDTHSFVENFKKFPPFKSEYGSFSEKAIKKLLPLIRLGKYWSWENIDKKTQERIEKILTGEFDEAIKSRVRDKAIHLTEEDHFQGLQLWLASYVVYGRHSEADNLDKWHTVADLEDYLAEFRQHSLRNPIVEQVITETLRVVKDIWLQYGQGAKDFFSEIHIELAREMKNTGDERKRLTSLVTDNENTNLRIKVLLSELLNDGNVENVRPYSPMQQEALKIFEDGVLNSDIEIEDDILKISKMAQPTNTELKRYKLWLEQKYRSPYTGQIIPLNRLFTADYEIEHIIPQSRFFDDSFSNKIICESAVNQLKDKQLGLEFIKNHSGTIVKLGMGKTAKILDVESYNEFVKGNYTKNISKRNKLMLEEIPDKMIERQLNDTRYISKFIISALSNIVRSESNDDGFNSKNVLPGNGKITSRLKQDWGMNDIWNELILPRFERMNKITDSAVFTAWNENNQKFLPIVPLEFSKGFQKKRIDHRHHALDALVIAASTREHINLLNNEHAKSDKRFDLNRKLRKFEKVAYNDPKTGKRIEKEVPTIFLKPWETFTVDAKNSLESIIVSFKQNLRVINRATNYSESYNDENGALRLGKDGNPLKEKIKQSKGDSWAIRKPMHKDFVYGKVHLQNVKLPKDKFITAIRKSLDVTFDLKRIETITDTGIQKILKNYLHSKENKVELAFSPEGIEDMNQHIERYNDGKKHQPIHKVRVFEIGSRFSLGESGNKKTKFVEAAKGTNLFFAVYQDDNKGKRNYETIPLNIVIERQKLGLHSVPTEDAKGGKLLFHLSPNDMVYVPTSEELEDNLASVNIKRLNTAQRKRIYKVEKASGVECYFIRQDIAYLIKNYDAKTKIGELESQNKLQTTMTDDRLKITDVCVKLNIDRLGSIAETFLGNQYGASKKT

SEQ ID NO: 239 - protein, 1365 aa, Filifactor alocis
MTKEYYLGLDVGTNSVGWAVTDSQYNLCKFKKKDMWGIRLFESANTAKDRRLQRGNRRRLERKKQRIDLLQEIFSPEICKIDPTFFIRLNESRLHLEDKSNDFKYPLFIEKDYSDIEYYKEFPTIFHLRKHLIESEEKQDIRLIYLALHNIIKTRGHFLIDGDLQSAKQLRPILDTFLLSLQEEQNLSVSLSENQKDEYEEILKNRSIAKSEKVKKLKNLFEISDELEKEEKKAQSAVIENFCKFIVGNKGDVCKFLRVSKEELEIDSFSFSEGKYEDDIVKNLEEKVPEKVYLFEQMKAMYDWNILVDILETEEYISFAKVKQYEKHKTNLRLLRDIILKYCTKDEYNRMFNDEKEAGSYTAYVGKLKKNNKKYWIEKKRNPEEFYKSLGKLLDKIEPLKEDLEVLTMMIEECKNHTLLPIQKNKDNGVIPHQVHEVELKKILENAKKYYSFLTETDKDGYSVVQKIESIFRFRIPYYVGPLSTRHQEKGSNVWMVRKPGREDRIYPWNMEEIIDFEKSNENFITRMTNKCTYLIGEDVLPKHSLLYSKYMVLNELNNVKVRGKKLPTSLKQKVFEDLFENKSKVTGKNLLEYLQIQDKDIQIDDLSGFDKDFKTSLKSYLDFKKQIFGEEIEKESIQNMIEDIIKWITIYGNDKEMLKRVIRANYSNQLTEEQMKKITGFQYSGWGNFSKMFLKGISGSDVSTGETFDIITAMWETDNNLMQILSKKFTFMDNVEDFNSGKVGKIDKITYDSTVKEMFLSPENKRAVWQTIQVAEEIKKVMGCEPKKIFIEMARGGEKVKKRTKSRKAQLLELYAACEEDCRELIKEIEDRDERDFNSMKLFLYYTQFGKCMYSGDDIDINELIRGNSKWDRDHIYPQSKIKDDSIDNLVLVNKTYNAKKSNELLSEDIQKKMHSFWLSLLNKKLITKSKYDRLTRKGDFTDEELSGFIARQLVETRQSTKAIADIFKQIYSSEVVYVKSSLVSDFRKKPLNYLKSRRVNDYHHAKDAYLNIVVGNVYNKKFTSNPIQWMKKNRDTNYSLNKVFEHDVVINGEVIWEKCTYHEDTNTYDGGTLDRIRKIVERDNILYTEYAYCEKGELFNATIQNKNGNSTVSLKKGLDVKKYGGYFSANTSYFSLIEFEDKKGDRARHIIGVPIYIANMLEHSPSAFLEYCEQKGYQNVRILVEKIKKNSLLIINGYPLRIRGENEVDTSFKRAIQLKLDQKNYELVRNIEKFLEKYVEKKGNYPIDENRDHITHEKMNQLYEVLLSKMKKFNKKGMADPSDRIEKSKPKFIKLEDLIDKINVINKMLNLLRCDNDTKADLSLIELPKNAGSFVVKKNTIGKSKIILVNQSVTGLYENRREL

SEQ ID NO: 240 - protein, 1130 aa, Streptococcus macedonicus
MTNGKILGLDIGIASVGVGIIEAKTGKVVHANSRLFSAANAENNAERRGFRGSRRLNRRKKHRVKRVRDLFEKYGIVTDFRNLNLNPYELRVKGLTEQLTNEELFAALRTISKRRGISYLDDAEDDSTGSTDYAKSIDENRRLLKTKTPGQIQLERLEKYGQLRGNFTVYDENGEAHRLINVFSTSDYEKEARKILETQADYNKKITAEFIDDYVEILTQKRKYYHGPGNEKSRTDYGRFRTDGTTLENIFGILIGKCNFYPDEYRASKASYTAQEYNFLNDLNNLKVPTETGKLSTEQKESLVEFAKNTAILGPAKLLKEIAKILDCKVDEIKGYREDDKGKPDLHTFEPYRKLKFNLDSVNIDYLSREVLDKLADILTLNTEREGIEDAIKRNLPNQFTEEQISEIINVRKSQSTAFNKGWHSFSAKLMNELIPELYATSDEQMTILTRLEKFKVKKKSSKNIKTIDEKEITDEIYNPVVAKSVRQTIKIINAAVKKYGDFDKIVIEMPRDKNADDEKKFINKRNKENKKEKDDALKRAAYLYNGTDKLPDEVFHGNKQLETKIRLWYQQGERCLYSGKPIPIQELVHNSNNFEIDHILPLSLSFDDSLANKVLVYSWTNQEKGQKTPYQVIDSMDAAWSFREMKEYVLKQKGLGKKKRDYLLTTENIDKIEVKKKFIERNLVDTRYASRVVLNSLQSALRELGKDTKVSVVRGQFTSQLRRKWKIDKSRETYHHHAVDALIIAASSQLKLWEKQDNPMFVDYGNNQVVDKQTGEILSVSDNEYKELVFQPPYQGFVNTISSKGFEDEILFSYQVDSKYNRKVSDATIYSTRKAKIGKDKKEETYVLGKIKDIYSQNGFDTFVKKYNKDKTQFLMYQKDPLTWENVIEVILGDYPTTKKSEDGKNDVKCNPFEEYRRENGLICKYSKKGKGTPIKSLKYYDKKLGNCIDITPEESRNKVILQSINPWRADVYFNPETLKYELMGLKYSDLSFEKGTGNYHISQEKYDAIKEKEGIGKKSEFKFTLYRNDLILIKDIASGEQEIYRFLSRTMPNVNHYVELKPYDKEKFDNVQELVEALGEADKVGRCIKSLNKPNISIYKVRTDVLGNKYFVKKEGDKPKLDFKNNKK

SEQ ID NO: 241 - protein, 1367 aa, Streptococcus pyogenes
MDKKYSIGLDIGTNSVGWAVITDDYKVPSKKFKVLGNTDRHSIKKNLIGALLFGSGETAEATRLKRTARRRYTRRKNRICYLQEIFSNEMAKVDDSFFHRLEESFLVEEDKKHERHPIFGNIVDEVAYHEKYPTIYHLRKKLADSTDKADLRLIYLALAHMIKFRGHFLIEGDLNPDNSDVDKLFIQLVQIYNQLFEENPINASRVDAKAILSARLSKSRRLENLIAQLPGEKRNGLFGNLIALSLGLTPNFKSNFDLAEDAKLQLSKDTYDDDLDNLLAQIGDQYADLFLAAKNLSDAILLSDILRVNSEITKAPLSASMIKRYDEHHQDLTLLKALVRQQLPEKYKEIFFDQSKNGYAGYIDGGASQEEFYKFIKPILEKMDGTEELLVKLNREDLLRKQRTFDNGSIPHQIHLGELHAILRRQEDFYPFLKDNREKIEKILTFRIPYYVGPLARGNSRFAWMTRKSEETITPWNFEEVVDKGASAQSFIERMTNFDKNLPNEKVLPKHSLLYEYFTVYNELTKVKYVTEGMRKPAFLSGEQKKAIVDLLFKTNRKVTVKQLKEDYFKKIECFDSVEISGVEDRFNASLGAYHDLLKIIKDKDFLDNEENEDILEDIVLTLTLFEDRGMIEERLKTYAHLFDDKVMKQLKRRRYTGWGRLSRKLINGIRDKQSGKTILDFLKSDGFANRNFMQLIHDDSLTFKEDIQKAQVSGQGHSLHEQIANLAGSPAIKKGILQTVKIVDELVKVMGHKPENIVIEMARENQTTQKGQKNSRERMKRIEEGIKELGSQILKEHPVENTQLQNEKLYLYYLQNGRDMYVDQELDINRLSDYDVDHIVPQSFIKDDSIDNKVLTRSDKNRGKSDNVPSEEVVKKMKNYWRQLLNAKLITQRKFDNLTKAERGGLSELDKAGFIKRQLVETRQITKHVAQILDSRMNTKYDENDKLIREVKVITLKSKLVSDFRKDFQFYKVREINNYHHAHDAYLNAVVGTALIKKYPKLESEFVYGDYKVYDVRKMIAKSEQEIGKATAKYFFYSNIMNFFKTEITLANGEIRKRPLIETNGETGEIVWDKGRDFATVRKVLSMPQVNIVKKTEVQTGGFSKESILPKRNSDKLIARKKDWDPKKYGGFDSPTVAYSVLVVAKVEKGKSKKLKSVKELLGITIMERSSFEKNPIDFLEAKGYKEVKKDLIIKLPKYSLFELENGRKRMLASAGELQKGNELALPSKYVNFLYLASHYEKLKGSPEDNEQKQLFVEQHKHYLDEIIEQISEFSKRVILADANLDKVLSAYNKHRDKPIREQAENIIHLFTLTNLGAPAAFKYFDTTIDRKRYTSTKEVLDATLIHQSITGLYETRIDLSQLGGD

SEQ ID NO: 242 - protein, 1233 aa, Mycoplasma canis
MEKKRKVTLGFDLGIASVGWAIVDSETNQVYKLGSRLFDAPDTNLERRTQRGTRRLLRRRKYRNQKFYNLVKRTEVFGLSSREAIENRFRELSIKYPNIIELKTKALSQEVCPDEIAWILHDYLKNRGYFYDEKETKEDFDQQTVESMPSYKLNEFYKKYGYFKGALSQPTESEMKDNKDLKEAFFFDFSNKEWLKEINYFFNVQKNILSETFIEEFKKIFSFTRDISKGPGSDNMPSPYGIFGEFGDNGQGGRYEHIWDKNIGKCSIFTNEQRAPKYLPSALIFNFLNELANIRLYSTDKKNIQPLWKLSSVDKLNILLNLFNLPISEKKKKLTSTNINDIVKKESIKSIMISVEDIDMIKDEWAGKEPNVYGVGLSGLNIEESAKENKFKFQDLKILNVLINLLDNVGIKFEFKDRNDIIKNLELLDNLYLFLIYQKESNNKDSSIDLFIAKNESLNIENLKLKLKEFLLGAGNEFENHNSKTHSLSKKAIDEILPKLLDNNEGWNLEAIKNYDEEIKSQIEDNSSLMAKQDKKYLNDNFLKDAILPPNVKVTFQQAILIFNKIIQKFSKDFEIDKVVIELAREMTQDQENDALKGIAKAQKSKKSLVEERLEANNIDKSVFNDKYEKLIYKIFLWISQDFKDPYTGAQISVNEIVNNKVEIDHIIPYSLCFDDSSANKVLVHKQSNQEKSNSLPYEYIKQGHSGWNWDEFTKYVKRVFVNNVDSILSKKERLKKSENLLTASYDGYDKLGFLARNLNDTRYATILFRDQLNNYAEHHLIDNKKMFKVIAMNGAVTSFIRKNMSYDNKLRLKDRSDFSHHAYDAAIIALFSNKTKTLYNLIDPSLNGIISKRSEGYWVIEDRYTGEIKELKKEDWTSIKNNVQARKIAKEIEEYLIDLDDEVFFSRKTKRKTNRQLYNETIYGIATKTDEDGITNYYKKEKFSILDDKDIYLRLLREREKFVINQSNPEVIDQIIEIIESYGKENNIPSRDEAINIKYTKNKINYNLYLKQYMRSLTKSLDQFSEEFINQMIANKTFVLYNPTKNTTRKIKFLRLVNDVKINDIRKNQVINKFNGKNNEPKAFYENINSLGAIVFKNSANNFKTLSINTQIAIFGDKNWDIEDFKTYNMEKIEKYKEIYGIDKTYNFHSFIFPGTILLDKQNKEFYYISSIQTVRDIIEIKFLNKIEFKDENKNQDTSKTPKRLMFGIKSIMNNYEQVDISPFGINKKIFE

SEQ ID NO: 243 - protein, 1375 aa, Lactobacillus johnsonii
MTKIKDDYIVGLDIGTDSCGWVAMNSNNDILKLQGKTAIGSRLFEGGKSAAERRLFRTTHRRIKRRRWRLKLLEEFFDPYMAEVDPYFFARLKESGLSPLDKRKTVSSIVFPTSAEDKKFYDDYPTIYHLRYKLMTEDEKFDLREVYLAIHHIIKYRGNFLYNTSVKDFKASKIDVKSSIEKLNELYENLGLDLNVEFNISNTAEIEKVLKDKQIFKRDKVKKIAELFAIKTDNKEQSKRIKDISKQVANAVLGYKTRFDTIALKEISKDELSDWNFKLSDIDADSKFEALMGNLDENEQAILLTIKELFNEVTLNGIVEDGNTLSESMINKYNDHRDDLKLLKEVIENHIDRKKAKELALAYDLYVNNRHGQLLQAKKKLGKIKPRSKEDFYKVVNKNLDDSRASKEIKKKIELDSFMPKQRTNANGVIPYQLQQLELDKIIENQSKYYPFLKEINPVSSHLKEAPYKLDELIRFRVPYYVGPLISPNESTKDIQTKKNQNFAWMIRKEEGRITPWNFDQKVDRIESANKFIKRMTTKDTYLFGEDVLPANSLLYQKFTVLNELNNIRINGKRISVDLKQEIYENLFKKHTTVTVKKLENYLKENHNLVKVEIKGLADEKKFNSGLTTYNRFKNLNIFDNQIDDLKYRNDFEKIIEWSTIFEDKSIYKEKLRSIDWLNEKQINALSNIRLQGWGRLSKKLLAQLHDHNGQTIIEQLWDSQNNFMQIVTQADFKDAIAKANQNLLVATSVEDILNNAYTSPANKKAIRQVIKVVDDIVKAASGKVPKQIAIEFTRDADENPKRSQTRGSKLQKVYKDLSTELASKTIAEELNEAIKDKKLVQDKYYLYFMQLGRDAYTGEPINIDEIQKYDIDHILPQSFIKDDALDNRVLVSRAVNNGKSDNVPVKLFGNEMAANLGMTIRKMWEEWKNIGLISKTKYNNLLTDPDHINKYKSAGFIRRQLVETSQIIKLVSTILQSRYPNTEIITVKAKYNHYLREKFDLYKSREVNDYHHAIDAYLSAICGNLLYQNYPNLRPFFVYGQYKKFSSDPDKEKAIFNKTRKFSFISQLLKNKSENSKEIAKKLKRAYQFKYMLVSRETETRDQEMFKMTVYPRFSHDTVKAPRNLIPKKMGMSPDIYGGYTNNSDAYMVIVRIDKKKGTEYKILGIPTRELVNLKKAEKEDHYKSYLKEILTPRILYNKNGKRDKKITSFEIVKSKIPYKQVIQDGDKKFMLGSSTYVYNAKQLTLSTESMKAITNNFDKDSDENDALIKAYDEILDKVDKYLPLFDINKFREKLHSGREKFIKLSLEDKKDTILKVLEGLHDNAVMTKIPTIGLSTPLGFMQFPNGVILSENAKLIYQSPTGLFKKSVKISDL

SEQ ID NO: 244 - protein, 1053 aa, Staphylococcus aureus
MKRNYILGLDIGITSVGYGIIDYETRDVIDAGVRLFKEANVENNEGRRSKRGARRLKRRRRHRIQRVKKLLFDYNLLTDHSELSGINPYEARVKGLSQKLSEEEFSAALLHLAKRRGVHNVNEVEEDTGNELSTKEQISRNSKALEEKYVAELQLERLKKDGEVRGSINRFKTSDYVKEAKQLLKVQKAYHQLDQSFIDTYIDLLETRRTYYEGPGEGSPFGWKDIKEWYEMLMGHCTYFPEELRSVKYAYNADLYNALNDLNNLVITRDENEKLEYYEKFQIIENVFKQKKKPTLKQIAKEILVNEEDIKGYRVTSTGKPEFTNLKVYHDIKDITARKEIIENAELLDQIAKILTIYQSSEDIQEELTNLNSELTQEEIEQISNLKGYTGTHNLSLKAINLILDELWHTNDNQIAIFNRLKLVPKKVDLSQQKEIPTTLVDDFILSPVVKRSFIQSIKVINAIIKKYGLPNDIIIELAREKNSKDAQKMINEMQKRNRQTNERIEEIIRTTGKENAKYLIEKIKLHDMQEGKCLYSLEAIPLEDLLNNPFNYEVDHIIPRSVSFDNSFNNKVLVKQEENSKKGNRTPFQYLSSSDSKISYETFKKHILNLAKGKGRISKTKKEYLLEERDINRFSVQKDFINRNLVDTRYATRGLMNLLRSYFRVNNLDVKVKSINGGFTSFLRRKWKFKKERNKGYKHHAEDALIIANADFIFKEWKKLDKAKKVMENQMFEEKQAESMPEIETEQEYKEIFITPHQIKHIKDFKDYKYSHRVDKKPNRELINDTLYSTRKDDKGNTLIVNNLNGLYDKDNDKLKKLINKSPEKLLMYHHDPQTYQKLKLIMEQYGDEKNPLYKYYEETGNYLTKYSKKDNGPVIKKIKYYGNKLNAHLDITDDYPNSRNKVVKLSLKPYRFDVYLDNGVYKFVTVKNLDVIKKENYYEVNSKCYEEAKKLKKISNQAEFIASFYNNDLIKINGELYRVIGVNNDLLNRIEVNMIDITYREYLENMNDKRPPRIIKTIASKTQSIKKYSTDILGNLYEVKSKKHPQIIKKG

SEQ ID NO: 245 - protein, 1063 aa, Simonsiella muelleri
MEKFHYVLGLDLGIASVGWAAIEIDKETETSIGLLDCGVRTFERAEVPKTGDSLAKARREARSTRRLIRRRSHRLLRLKRLLKREIFRQPETFKDLPINAWQLRVKGLDSRLNEYEWAAVLLHLVKHRGYLSQRKSEMSETDSKSEMGRLLAGVAENHQLLQQEQYRTPAELALKKFVKHFRNKGGDYAHTFNRLDLQAELHLLFQKQRELGNPFTSPELERQVDDLLMTQRSALQGDAILKMLGHCGFEPEQFKAAKNTFSAERFIWLTKLNNLRIQDQGKERALTADERTKLLDEPYKKSKLTYAQVRKLLSLPQTAIFKGLRYDLEHDKKAENSTLMEMKSYHNIRQTLEKSGLKTEWQSIATQPEILDAIGTAFSIYKTDEDISHELKTCRLPENVLNELLKNINFDGFIQLSLTALRKILPLMEQGYRYDEACTQIYGNHHSGSLQQESKQFLPHIPIDDVRNPVVFRTLTQARKVVNAIIRRYGSPARVHIEMARELGKSKSDRDRIEKQQQKNKKERENAVAKFKEDFPDFVGEPRGKDILKMRLYEQQHGKCLYSGHDIDINRLNEKGYVEIDHALPFSRTWDDSQNNKVLVLGSENQNKRNQTPDEYLDGANNSQRWLEFQARVQTCHFSYGKKQRIQLAKLDDETEKGFLERNLNDTRYIARFMCQFVQENLYLTGKGKRLVFASNGGMTATLRNLWGLRKVREDNDRHHALDAIVVACSTASMQQKITKAFQRHESIEYVDTETGEVKFRIPQPWDFFRQEVMIRVFSDQPCEDLVEKLSARPEALHDNVTPLFVSRAPNRKMSGQGHLETIKSAKRLSEENSMVKKPLTTLKLKDIPEIVGYPSREPQLYAALKTRLETHDDDPIKAFAKPFYKPNKNGELGALVRSVRVKGVQNTGVMVHDGKGIADNATMVRVDVYTKAGKNYLVPVYVWQVAQGILPNRAVTSGKSEADWDLIDESFEFKFSLSRGDLVEMISNKGRIFGYYNGLDRANGSIGIREHDLEKSKGKDGVHRVGVKTATAFNKYHVDPLGKEIHRCSSEPRPTLKIKSKK

SEQ ID NO: 246 - protein, 1509 aa, Psychroflexus torquis
MKRILGLDLGTNSIGWSLIEHDFKNKQGQIEGLGVRIIPMSQEILGKFDAGQSISQTADRTKYRGVRRLYQRDNLRRERLHRVLKILDFLPKHYSESIDFQDKVGQFKPKQEVKLNYRKNEKNKHEFVFMNSFIEMVSEFKNAQPELFYNKGNGEETKIPYDWTLYYLRKKALTQQITKEELAWLILNFNQKRGYYQLRGEDIDEDKNKKYMQLKVNNLIDSGAKVKGKVLYNVIFDNGWKYEKQIVNKDEWEGRTKEFIITTKTLKNGNIKRTYKAVDSEIDWAAIKAKTEQDINKANKTVGEYIYESLLDNPSQKIRGKLVKTIERKFYKEEFEKLLSKQIELQPELFNESLYKACIKELYPRNENHQSNNKKQGFEYLFTEDIIFYQRPLKSQKSNISGCQFEHKIYKQKNKKTGKLELIKEPIKTISRSHPLFQEFRIWQWLQNLKIYNKEKIENGKLEDVTTQLLPNNEAYVTLFDFLNTKKELEQKQFIEYFVKKKLIDKKEKEHFRWNFVEDKKYPFSETRAQFLSRLAKVKGIKNTEDFLNKNTQVGSKENSPFIKRIEQLWHIIYSVSDLKEYEKALEKFAEKHNLEKDSFLKNFKKFPPFVSDYASYSKKAISKLLPIMRMGKYWSESAVPTQVKERSLSIMERVKVLPLKEGYSDKDLADLLSRVSDDDIPKQLIKSFISFKDKNPLKGLNTYQANYLVYGRHSETGDIQHWKTPEDIDRYLNNFKQHSLRNPIVEQVVMETLRVVRDIWEHYGNNEKDFFKEIHVELGREMKSPAGKREKLSQRNTENENTNHRIREVLKELMNDASVEGGVRDYSPSQQEILKLYEEGIYQNPNTNYLKVDEDEILKIRKKNNPTQKEIQRYKLWLEQGYISPYTGKIIPLTKLFTHEYQIEHIIPQSRYYDNSLGNKIICESEVNEDKDNKTAYEYLKVEKGSIVFGHKLLNLDEYEAHVNKYFKKNKTKLKNLLSEDIPEGFINRQLNDSRYISKLVKGLLSNIVRENGEQEATSKNLIPVTGVVTSKLKQDWGLNDKWNEIIAPRFKRLNKLTNSNDFGFWDNDINAFRIQVPDSLIKGFSKKRIDHRHHALDALVVACTSRNHTHYLSALNAENKNYSLRDKLVIKNENGDYTKTFQIPWQGFTIEAKNNLEKTVVSFKKNLRVINKTNNKFWSYKDENGNLNLGKDGKPKKKLRKQTKGYNWAIRKPLHKETVSGIYNINAPKNKIATSVRTLLTEIKNEKHLAKITDLRIRETILPNHLKHYLNNKGEANFSEAFSQGGIEDLNKKITTLNEGKKHQPIYRVKIFEVGSKFSISEDENSAKSKKYVEAAKGTNLFFAIYLDEENKKRNYETIPLNEVITHQKQVAGFPKSERLSVQPDSQKGTFLFTLSPNDLVYVPNNEELENRDLFNLGNLNVEQISRIYKFTDSSDKTCNFIPFQVSKLIFNLKKKEQKKLDVDFIIQNEFGLGSPQSKNQKSIDDVMIKEKCIKLKIDRLGNISKA

SEQ ID NO: 247 - protein, 1112 aa, Staphylococcus simulans
MLVGLKFKQSILFENMENAEDIKESATGSDAISLSDDYYENLSEFLTDEQLNFIESANTFFMGIMLDRILKGATSISAAKVRDYKIFKSQLKLIKDIVYQNKYDKYHEFFVTSKEDMRAYQENPDAKNFGKLSKFDQYLIHSKDQYAKLMKDLKGLVPKEYTEVLNLIDEQKFLVVQNTTDNASIPYQNNVFEAENILRNQQKYYPEITEEMIGKVINLISFRIPYYVGPLTNKNGQSDFAWMIRKSDEQTLPWNFDKVIDKSKSAEKFIRRMTSKCTYLLEEDVLPKHSLLYQEMEVLNELNNVQLRGENEPKHRIHRLDPKVKQFIYHNLFQKKKNVTHKDLITLLQNSEHRNTLNKTSGQKLKVFGTQNDSKFASKLSTYNDMKAILGSVENKRQMIEELVLWITIFEDKAILKQKIGEKYPNITEKQLNQIVKLNYSGWGRLSEKLLTKEVNGRSLIDLMYSTENNFMEIITDKTLGFDCFIKNSNKVKNAKISYKDVAELRTSPALKKGIWNAIKMVREISNLFGAPEKIIIEFATEDQAKGKRQKSRSELWDDLVKKNNLKRNKEFEGLFEELKAYPDLDFSNPKLWLYIHQNGKCMYTKKPIDLERLMSDTNNQLYEIDHILPRTFVKDDSINNKVLVIQSANQKKSGDKMPLEIFDNHVLVPFWKMLYENDLISSSKLSKLMKKEFNDLDKEGFIQRQLVETRQIISHVSDFLTEEYPSTTVVPMKANVVSELRRKFDIPKIRQLNDWHHAVDAYLNGFVYQAARVFYPKVNLFEFNFKWEKVREKWRQLGEFTENNKKREFFLFKRMENYVNEYGEGMISKLIFDLDNFKFNYSRKVESTESAFYKQSAFSPKNTTAQYDSDKNKTAIYKEMKNKRGIVVSYTYVKKDQELIGYGVFNETVFEYVNNADVDMNTRALKIVRKAFPKLDIKKAQYLFSINKGDALLVNGHPFLFVSAYERINGKQLEFDIAMQRKIKQALSPYNNMTEQEKVEFYNQFAEKVIEEFRNSIGLQSRDRKVNLIKNLFNNTEKSNDSMTQSILEVLKMTKVSAERSKELKIRWNGQTPNTFIDTKNNAEIQYKSITGLKTTKPKSIFKLAESKNEL

SEQ ID NO: 248 - protein, 1274 aa, Mycoplasma gallisept
MNINMNNSIKSKPEVTIGLDLGVGSVGWAIVDNETNIIHHLGSRLFSQAKTAEDRRSFRGVRRLIRRRKYKLKRFVNLIWKYNSYFGFKNKEDILNNYQEQQKLHNTVLNLKLEALNAKIDPKALSWILHDYLKNRGHFYEDNRDFNVYPTEELANYFDEFGYYKGIIDSKNDDDDKLEEGLTKYKFSNQHWLEEVKKVLSNQTGLPEKFKEEYESLFSYVRNYSEGPGSINSVSPYGIYHLDEKEGKVVQKYNNIWDKTIGKCSIFPDEYRAPKNSPIAMIFNEINELSTIRSYSIYLTGWFINQEFKKAYLNKLLDLLIKTNSEKPIDARQFKKLREETIAESIGKETLKDVESEEKLEKDDHKWKLKGLKLNTNGKIQYNDLSSLAKFVHKLKQHLKLDFLLEDQYTPLDKINFLQSLYVYLGKHLRYSNRVDSANLKEFSDSSRLFERVLQEQKDGLFKLFEQTDKDDEKILTQTHSLSTKAMLLAITRMTNLDNDEDNQKNNDKGWNFEAIKNFDQKFIDITKTNNNLSLKQDKRYLDDQFINDAILSPGVKRILREATKVFNAILKQFSEEYDVTKVVIELARELSEEKELENTKNYKKLIKKNGDKISEGLKALGIAEDKIEEILKSPTKSYKVLLWLQQDHIDPYSQKEIAFDDILTKTEKTEIDHIIPYSISFDDSSSNKLLVLAESNQAKSNQTPYEFINSGKAEITWEVYEAYCHKFKNGDSSLLDSTQRSKKFAKMMKTDTSSKYDIGFLARNLNDTRYATIVFRDALKDYANNHLVEDKPMFKVVCINGGVTSFLRKNFDPKSWYAKKDRDKNIHHAVDASIISIFSNETKTLFNQLTKFADYKLFKNTDGSWKKIDPKTGVVSEVTDENWKQIRVRNQVSEIAKVIDKYIQDSNIERKARYSRKIENKTNISLFNDTVYSAKKVGYEDQIKRKNLKTLDIHESAEENKNSKVKKQFVYRKLVNVSLLNNDKLADLFAEKEDILMYRANPWVINLAEQIFNEYTENKKIKSQNVFEKYMLDLTKEFPEKFSEAFVKSMIRNKTAIIYNVEKDVVHRIKRLKILSSELKENKWSNVIIRSKNESGTKLSYQDTINSIALMIMRSIDPTAKKQYIRVPLNTLNLHLGDQDFDLHNIDAYLKKPKFVKYLKANEIGDEYKPWRVLTSGTLLIHKKDKKLMYISSFQNLNDLIEIKNLIETEYKENVDSDPKKKKKASQILRSLSVILNDYILLDAKYNFDILGLSKNKIDEILNSKLDLDKIAK

SEQ ID NO: 249 - protein, 240 aa, Acetobacter aceti
MANIAENLVFGIDLGIGSCGWAVLNQKAKDENIVALGSWCFDVPETDKERIPTNQIRRANRLLRRVIRRRRNRMAEIRRLFASKGMLDTADPDALAKISADPWEMRAKGLDYQLTPQEFAVALGHIAKRRGFKSAAKRVSTNAPSEDSKMLAALEKTKEQSAQYRTIGEMFARDPAYADRRRNRDGCFDRTMSREDLFKETQILFESQRRLGNFSATSETEQAFIDIAFRQKPMQDSERL

SEQ ID NO: 250 - protein, 400 aa, Acetobacter aceti
SFERFRLLCRLVNLRVTDGLEDRPLTPEELRLACEDAGKTRKLSVKKVRSLIGLRDDQRFTTIPPDQEQHDIAARTGDALTGTATFRAILGESFWRQLLPHPEQLDRAAWIISFHELTDTIISKLATIGLPSEVMELIRKALEDGKFSKFKGAASLSDKAARKLIPFLQEGLTYDKACQKAGYNHAASKFTHYDSIDTKAKFNSLMDDVRDSITNPVARKAISEGMKQVWAMRNQWGLPGAICIELARDVGNSAEKRREIESGIKKNTAQRERERQEAKEHLNQSDISSETLLRYRLWKEQGGRCCYTDQPITPSQLIASDNSVQVDHILPWSRFGDDSYLNKALCTAKANQEKKNRTPWEWIHNQKGVEAWNHFTAAVESRKETRGLKKRNFLLKSSKE

SEQ ID NO: 251 - protein, 376 aa, Acetobacter aceti
YAARVMAEAVRLLYPSGNRAEKGGVKRVFTRPGALTAALRHAWGVESLKKINGKRLNDDRHHALDAAVVAAVSEKEIQKLTKSFQICEQKGLARPMRDVPMPWEGFRHQLETAYADIRVARPERRRARGKGHDATIRQLREEKDGPVVYERRAISDLKLTDLERIKDPERNSAIISSLRTWIEKGKPADYPPQSPKGDEIRKIRVMSRNKPAVSVRGGTADRGEMTRVDVFTKMGKKGKPEWFLVPIYRHQVIDRIQWPQPPNQAAANGKSEKNWPTMGLEHEFRFSLYPRSYVQIVKRDGEIIEGYFAGLDRTVAAFSLLSSSDPTSIQRGIGAKTLESIRKYNVNRFGDISMVEQETRTWHGDVCISPDQPDSA

SEQ ID NO: 252 - protein, 1054 aa, Actinobacillus suis
MKLTPLNYILGLDLGIASVGWAVVEIDEQENPLGLIDVGVRTFDRAEVPKTGESLALARRLARSARRLVKRRADRIKKAKRLLKAENILLSADEHLPNDVWQLRVKGLDQKLERQEWAAVLLHLLKHRGYLSQRKNESKSENKELGALLSGVETNHQILQSAEYRTPAEIAVKKFHVEDGHIRNQRGAYTHTFSRLDLLAEMELLFQRQTDLGNPHTSAKLLENLTALLMWQKPALAGEAILKMLGKCTFEPTEYKAAKNSYSAERFVWLTKLNNLRILEQGAERALTDNERFALLDQPYEKAKFTYAQARTMLALPDEAIFKGVRYQGEDKKAVETKTILMEMKAYHQIRKALENADLKAEWNELKNNSELLDDIGTAFSLHKTDEDICRYLDGKLSESILNALLENLNFDKFIQLSLKALQQILPLMLQGQRYDEAVSAIYGDHYGKKSAEINRLLPTIPADEIRNPVVLRTLTQARKVINAVVRLYGSPARIHIETGREVGKSYQDRKKLEKQQEDNRKQRESAVKKFKEYFPNFVGEPKGKDILKMRLYELQQAKCLYSGKSLELHRLLEKGYVEVDHALPFSRTWDDSFNNKVLVLANENQNKGNLTPYEWLDGKNNSEHWQNFVARVQTSGFSHTKKQRILSHKLDEKGFIERNLNDTRYVARFLCNFIADNMLLTGKGKRKVFASNGQITALLRGRWGLQKVRDDNDRHHALDAVVVACSTVVMQQKITRFVRYEEGNVFSGERIDRETGEIIPLHFPSPWAFFRENVEIRIFSENPKLELENRLPDYPQYNHEFVQPLFVSRMPTRKMTGQGHMETVKSAKRLDEGLSVLKVPLTQLKLSDLERMVNREREVTLYESLKARLEQFGNDPAKAFAEPFHKKGGAVVKAVRVEQTQKSGVLVRDGNGVADNASMVRVDVFTKGGKYFLVPIYTWQVAKGILPNKAVTANVDEIDWLEMDESYQFIFTMYPNDLVKVKLKKEEFFGYYGGLDRATGAIVIKEHDLEKSKGKQGIYRIGVKLALSFEKYQVDELGKNIRPCRPTKRQHVR

SEQ ID NO: 253 - protein, 239 aa, Actinobacillus ureae
MEIRIFSENPKLGLENRLPGYPQYNHEFVQPLFVSRMPTRKMTGKGHMETVKSAKRLDEGLSVLKVPLTQLKLSDLERMVNREREDALYQSLKAHLEQFGNDPAKAFAEPFHKKGGTVVKAVRVEQTQKSGVLVRDGNGVADNTSMVRVDVFTKAGKYFLVPIYKWQVAKRILPNKAVTAGVDEIDWLEMDSSYQFIFTMYANDLVKVKLKKRSILGLLRWFRSCNWGYCYQRTRFREI

SEQ ID NO: 254 - protein, 400 aa, Actinobacillus ureae
MKLTPLNYILGLDLGIASVGWAVVEIDEQENPLGLIDVGVRTFDRAEVAKTGESLALARRLARSSRRLVKRRADRIKKAKRLLKAENLLLSADEILPNDVWQLRVKGLDQKLERQEWAAVLLHILKHRGYLSQRKNESKSENKELGALLSGVATNHQLLQTAEYRTPAEITVKKFQAEENGHGHIRNQRGDYSHTFDRKDLLAEMKLLFQRQAELGNPHTSEKLLENLTTLLLWQKPALAGEAILKMLGKCTFEPAEYKAAKNSYSAERFVWLTKLNNLRILENGIERALTDNERFTLLDQPYEKAKLTYAQARTMLALSDEAIFKGVRYQGEDKKAAEKVALIEMKGYQHIRKALEGAGLKAEWNELKNNSELLDDIGTAFSLYFSISNLPTEIAYFTP

SEQ ID NO: 255 - protein, 1113 aa, Actinomyces georgiae
MSASSQNVERIRYKVGIDVGLRSIGFCAVQVDADDRPVKLLNTVVHVHDAGVSPADAKKADTRKLVSGVARRTRRLYRTRKRRLVDLDRQLDGLGWPLVDPARFADPREPWFAREKLVSGRVDDADERKELLSVALRHIAHHRGWRNPYSTVESLQADAPPSEFLQGLNQRVSEKLGTELDPGLTQGQLVAKLLHRFPNAKIRGPEGILRGKLHQSDNAGELRLICRTQGLDCHITEELVRLVFQAKSPKANKEMRKRIGRDQLPGQGAHIRAEKAHPVFQRFRIVAVLANLRIREAHVDRRLTAEEMRTLTDFLLGLAGSEQPTWEELADNLNIERHQLRGTAKASVDGAPALRFPPIDATTDRIYASKLKWLAEWWRQADEERRGYMVDALSNSGGSEDEPYLDDEIAEMLEQASEEDQAKLDSLHLPGGRASYCLDTLRRLTDAMLGGGLDLFEARKAVFHVDDDWAPPTDPIGAPVGNPPVDRVLKHVARWLEAATGRWGAPQTINIEHVREGLGSEKAARELTRMNDRRRRNNQKLVEEMGEKLGMSGRIRRSDRMRYEAIRRQNCECLYCGQPITYQTMEMDHIVPRAGAASTNSRSNLAAVCRRCNHQKGKLPFAVWAESQDSPAEVRLQDAVQRVRHWLRDAGMGQKELQALRVQVIARLKSKRPDEEFDGRSMESIAWMANELRARVEAQYRGSGTTVRVYRGALTAEARKASGFEGRVNLIGGRGKDRFDRRHHAMDALVIALMNQSVAQTLALRLNMRDSQWLTQSEQTWRQFHGAPGEAARKWEAWDRDMRDASDLFNLALDGGRIPITENVRLRVGNGRVHEDGVIRFKPEYEVKGKTIKGGEARLLGDSLPSEQIDRAETPALWTALTRLPEYDRKSGLPENPDRVIRVNGAVVQATDRIRFFGTPASVAVRGGYAKLGESIHHARIYRINGKTPKYAMIRVYTIDLMRLNHEDIFTAVLKPSTISMRCAEKKLKYAIAEGNAEQIGWLVEGDQLELDAAAYAKGVGADLMREYPMATCWRVAGFPDEAKLRLRPVLLAAEGMGEDAPKFMREVLENQGWRPAVNALLSPGSVRVVRRNVLGEPRFKSSGHLPTTVDLV

SEQ ID NO: 256 - protein, 1101 aa, Actinomyces naeslundii
MWYASLMSAHHLRVGIDVGTHSVGLATLRVDDHGTPIELLSALSHIHDSGVGKEGKKDHDTRKKLSGIARRARRLLHHRRTQLQQLDEVLRDLGFPIPTPGEFLDLNEQTDPYRVWRVRARLVEEKLPEELRGPAISMAVRHIARHRGWRNPYSKVESLLSPAEESPFMKALRERILATTGEVLDDGITPGQAMAQVALTHNISMRGPEGILGKLHQSDNANEIRKICARQGVSPDVCKQLLRAVFKADSPRGSAVSRVAPDPLPGQGSFRRAPKCDPEFQRFRIISIVANLRISETKGENRPLTADERRHVVTFLTEDSQADLTWVDVAEKLGVHRRDLRGTAVHTDDGERSAARPPIDATDRIMRQTKISSLKTWWEEADSEQRGAMIRYLYEDPTDSECAEIIAELPEEDQAKLDSLHLPAGRAAYSRESLTALSDHMLATTDDLHEARKRLFGVDDSWAPPAEAINAPVGNPSVDRTLKIVGRYLSAVESMWGTPEVIHVEHVRDGFTSERMADERDKANRRRYNDNQEAMKKIQRDYGKEGYISRGDIVRLDALELQGCACLYCGTTIGYHTCQLDHIVPQAGPGSNNRRGNLVAVCERCNRSKSNTPFAVWAQKCGIPHVGVKEAIGRVRGWRKQTPNTSSEDLTRLKKEVIARLRRTQEDPEIDERSMESVAWMANELHHRIAAAYPETTVMVYRGSITAAARKAAGIDSRINLIGEKGRKDRIDRRHHAVDASVVALMEASVAKTLAERSSLRGEQRLTGKEQTWKQYTGSTVGAREHFEMWRGHMLHLTELFNERLAEDKVYVTQNIRLRLSDGNAHTVNPSKLVSHRLGDGLTVQQIDRACTPALWCALTREKDFDEKNGLPAREDRAIRVHGHEIKSSDYIQVFSKRKKTDSDRDETPFGAIAVRGGFVEIGPSIHHARIYRVEGKKPVYAMLRVFTHDLLSQRHGDLFSAVIPPQSISMRCAEPKLRKAITTGNATYLGWVVVGDELEINVDSFTKYAIGRFLEDFPNTTRWRICGYDTNSKLTLKPIVLAAEGLENPSSAVNEIVELKGWRVAINVLTKVHPTVVRRDALGRPRYSSRSNLPTSWTIE

SEQ ID NO: 257 - protein, 1181 aa, Actinomyces sp.
MLHCIAVIRVPPSEEPGFFETHADSCALCHHGCMTYAANDKAIRYRVGIDVGLRSIGFCAVEVDDEDHPIRILNSVVHVHDAGTGGPGETESLRKRSGVAARARRRGRAEKQRLKKLDVLLEELGWGVSSNELLDSHAPWHIRKRLVSEYIEDETERRQCLSVAMAHIARHRGWRNSFSKVDTLLLEQAPSDRMQGLKERVEDRTGLQFSEEVTQGELVATLLEHDGDVTIRGFVRKGGKATKVHGVLEGKYMQSDLVAELRQICRTQRVSETTFEKLVLSIFHSKEPAPSAARQRERVGLDELQLALDPAAKQPRAERAHPAFQKFKVVATLANMRIREQSAGERSLTSEELNRVARYLLNHTESESPTWDDVARKLEVPRHRLRGSSRASLETGGGLTYPPVDDTTVRVMSAEVDWLADWWDCANDESRGHMIDAISNGCGSEPDDVEDEEVNELISSATAEDMLKLELLAKKLPSGRVAYSLKTLREVTAAILETGDDLSQAITRLYGVDPGWVPTPAPIEAPVGNPSVDRVLKQVARWLKFASKRWGVPQTVNIEHTREGLKSASLLEEERERWERFEARREIRQKEMYKRLGISGPFRRSDQVRYEILDLQDCACLYCGNEINFQTFEVDHIIPRVDASSDSRRTNLAAVCHSCNSAKGGLAFGQWVKRGDCPSGVSLENAIKRVRSWSKDRLGLTEKAMGKRKSEVISRLKTEMPYEEFDGRSMESVAWMAIELKKRIEGYFNSDRPEGCAAVQVNAYSGRLTACARRAAHVDKRVRLIRLKGDDGHHKNRFDRRNHAMDALVIALMTPAIARTIAVREDRREAQQLTRAFESWKNFLGSEERMQDRWESWIGDVEYACDRLNELIDADKIPVTENLRLRNSGKLHADQPESLKKARRGSKRPRPQRYVLGDALPADVINRVTDPGLWTALVRAPGFDSQLGLPADLNRGLKLRGKRISADFPIDYFPTDSPALAVQGGYVGLEFHHARLYRIIGPKEKVKYALLRVCAIDLCGIDCDDLFEVELKPSSISMRTADAKLKEAMGNGSAKQIGWLVLGDEIQIDPTKFPKQSIGKFLKECGPVSSWRVSALDTPSKITLKPRLLSNEPLLKTSRVGGHESDLVVAECVEKIMKKTGWVVEINALCQSGLIRVIRRNALGEVRTSPKSGLPISLNLR

SEQ ID NO: 258 - protein, 1120 aa, Actinomyces sp.
MNAMKQYNAGIDVGINSVGFAAIEVDSKGLPLNILNNMVVLHDSGVDPGTAKTGATRLANSGTARRTRKLIARRRKRLQKLDRYIEVQGWPLVDFSSLPDPYTPWKIRAKLTQDRLEGEEQGRGLSIALRHMARHRGWRNPYEGVESLHSPKEASKQFKDLKDRVTKVSGVIFDEDATPAEVVCDIGLSPKQRLRSAPSAKYKEGATLADEPVGGKSKEGLLGGKLMQSDNANELRKIGIVQGLSNEKVNEIIDQVFASESPKGQAGKRAKKDELPGQEQYVRALRAHLAFQRFRIVAAVANLRILEAEPKHERLLSQSEKDKVIEFLMSADGDDGVTWSDVAEELGIERECLSGTAKRGADGERPSSFPPTNSTNISIVRSKVKPLIEWWRKASDDEQATLVTALSNADELTDDQPSAETVRQFLSSPDEQSQEKIDKISLPKGRAAYSVNSLERLTRRMLKDSVDLFEARKREFGVDNNWTPTPDSIGEPVGNPAVDRVLKIVNRWLLAVTRKWGPPKVVNIEHVRVGFTSAAQTRKYEEENKTNRERNLAILEELRDKFGTSGKIRREDITRFAALRRQNCQCAYCGEAITFFDCEMDHIVPRKGPGSTNTRNNLVAICERCNKSKSNMPFSLWAQNCDIPGVSVEAVIDRVRTWIKDPELNPKQYNNFKKDVIERLRKTVDDDAIDNRSIESVAWMATELADRIGSHFRTAGANTKVRVYRGWLTSEARKASGFEGKINLIGGRGKTRLDRRHHAMDAATIALMRQSVAQTLVERASIRESDRLRRVVSSSWKDYRGADRDKQFSYGSWLNSMNALAELFNRAIDADGIPVTQNLRLRLGNGEAHDATIRSLEKKRVGASWTIGEIDRASTPQLWLALTRQEDFDQNDGLPANASRELRVKNHWFHAEENVTLFPTKSAAIAVRGGYAEIGNTIHHARLYKLPGKKLTYGMIRVFAIDLLCAWHTDLFSSPLLPESISLRTAETKVRRAVEDGAAMYIGWLVDGDEIVLDPETKAFKSNKIGEYLCEFPGTKRWKVDGFPDKEKLRLRPLQLAGEGLPEDVSAGTEEILGPKGNGWRVAINALFKSSQLVVVRRTALGMVRKLSRRHLPLTTRLRG

SEQ ID NO: 259 - protein, 1095 aa, Actinomyces sp.
MPAHHLRVGIDVGTHSVGLATLRVDDQGTPIELLSALSHIHDSGIGKEGQKDHDTRKKLSGVARRTRHLLRNRRERLQQLDKVLVDLGFPIPKPEEYPDLSERTDPYRVWRVRARLVEETLPEELRGPAISMAVRHIARHRGWRNPYSKVESLLSPAEESSFMKALRKRIMTKTGEVLDDDITPGQAMAQVALTHKIYMRGPEGILGKLHQSDNANEIRKICARQGISSDVCKQLLRAVFKAESPRGSAVSRVAPDPLPGQGSFRRAPKCDPEFQRFRIISIVANLRISETKGENRPLTVDERRQVVAFLMEDSQADLTWVDVAEKLRVSRQALRGTAMLTADGERSAAQPPIDVTDQIMRKTKISALKTWWDKADAERRGAMVRYLYEGLEDSECAEVIAKLPEKDHAKLDSLHLPAGRAAYSRESLTALSDHMLETTNDLHEARKRLFGVDDSWAPPAEPVGAPVGNPSVDRTLKIVARYLSAVESIWGTPEVIHVEHVRDGFTSERTAEERDKANRSRHNDNQKAIEKIQHDYGKEGYISRGDIVRFHALKLQGSACLYCGTTIGYHTCQLDHIVPQAGPGSNNRRGNLVAVCERCNHSKSNTPFAVWAQKCGIPHVGVKEAISRVNGWVEHNHSTSSGDLTRLKKEVIARLRRTQKDPEIDERSMESVAWMANELHHRIAAAYPETTVMVYRGSITAAARKAASIESRINLIGEKGRKDRLDRRHHAVDASVVALMEPSVAKTLAERSSLRGEQRLTGQEQTWKQYTGLTVGARERFEAWRGHMHRLTELFNESLAADEVYVTQNIRLRLSDGSAHTVKASKLVSHRLGDGLTVQQIDRACTPALWCALTREIDFDEKNGLPAREDRVIRVHGQEISSADCIQVFSKRKKTKSDRDEAPFGAIAVRGGFVEIGSSIHHARIYRIEGEKPAYAMLRVFTHDLLSQRHGDLFSAVIPPQSISMRCAATELRQAISEGRATYLGWIVSGDELHIPVETFTTHKIGSFLKDYPNTTRWRICGYDSETMLILKPRILSAEGLNNSSDIAEYVIKNKGWRVAINKLAKVHPTVVRRDALGRPRHSSRSNLPVTWSIE

SEQ ID NO: 260 - protein, 1144 aa, Actinomyces sp.
MSMIDSSENVPGIRYRVGIDVGLKSIGFCAVEVDRNDQPVRMLNSMVFIHDAGVDPNENKAAKSRKLTAGVARRTRRLYRTRHQRLVNLDRVLSKEFGWPLPDLTSFKDPREPWHVRAGLLEGYIADDEKRKEALSIALRHIARHRGWRNPYAKVETLLQPSEPSDFLKGLNDRISEELGRAFPADATPGQLVDTYLAHPDYVGRAGTPKLRGPQGILAGKLHQSDNAQEIRGICDVQRIEPAERDRLIRVVFEAKSPKGSAKERGLVGYDELPGQGRHVRAEKAHPAFQLFRMVSVLANLRIREGREERPLTPDELEDLVDFINQVSLKQEVTWQDLADKLRIERADLRGTAKASFDGSPVLRNPPTDVTTEKIMACKVKWLKEWWKEADDEQRGYMVDAFSNSGGSEDGTDVNDEVAELLEQATEDDQLEFEKISLPQGRAAYSLDSLRRLTDRMLRDGVDLHTARRLEFNVGDDWKPAVEPIGAPTGNPAVDRVLKQVSRWLHAATERWGEPTVINIEHARDGLGSERVARELMRENEKRRKANASAVAEMAAKLKLSGKVHRSDQIRYFALQRQNCQCLYCGAPITYTTAEMDHIVPRADGSSTNDRSNLAAVCRTCNHMKGKIPFAVWASSDKANQGVSLTGALERVNMWQRDSGMSPRQLKQLQREVCARLKSKKPDQEFDGRSMESVAWMAVELRTRIEGFYRSRDEESVPSVGVYRGQLTAEARRASGFESRVNLIGGRGKTRFDRRHHAMDALVIALMNPSVSRTLALRLNMRDAQRLTGVEETWKHFYGKPGEASKRFESWRESMLRGVELFNIALSDNAIPFVENIRLRVGSSVIHDATVHSFCPPKTPDGKQIITKGYGEQHSLGSAMPVELIDRAETPALWTALTRCPDFDPKKGLPENPQRTISVNGTRVGPTELVNFFEFSKSGPKACLKVRGGYVDLSGAIHHARIYRIAGKKTAYAMIRVFQVDLLRLKDHDVFTTPLKPSTISMRTAEPKIREALANGTATQIGWLVEGDELVIDTSKYSGGFIGEVLARYPEATSWRVAGFMTPAKLRIKPILLSKEGFVDETQAALLGVEVTSEAIQKTVDRPGWLPAVNVLFGAGGVRVIRRNCLGEERYHSSASLPVSMTLE

SEQ ID NO: 261 - protein, 1103 aa, Actinomyces sp.
MTKINDDLRYRVGIDVGLKSIGFCAVEVDENDQPLRLLNSMVFVHDAGVDPNENKAAKSRKLTAGVARRTQRGTAQNRRRLAELDRALSEELNWPLPNLEDFEDSYEPWHTRAELVEHYIKDDAERAEALAIAIRHIARHRGWRNPYLSVDSLLTPQEPSKFLRGLNERVTQALGREFPADATPGQLICAYIDSPKYAETQGIRGDSGILSGKLHQFDNVGEIRKICEVQRLDHDVFKLLVRKVFFAKSPRGSAAGLVGHDQIPGQGKYIRAEKAHPDFQLFRIVAVLTNLRIREGKAERCLTPDELRGLVDYILEVQLKQQVTWADLADNLGIERTDLRGTARASFDGSPALRFPPTDVTAEKIMASKVKWLKDWWDKADSERRGFMVDALSNSGGSTGDNDIDDEVAALLEAATEDEQAELEKIQLPQGRAAYSLDSLRRLTKRMLEEGVDLHTARKEEFNVDDDWRPEPEPIEAPVGNPAVDRVLKQVARWLNMATDRWGVPDVINIEHTRDGLGSEKVARELLRESQKRQDLNQKDMDKMIRELGISGKARRSSLIKYQAIQRQNSMCLYCGTEIGFETAEMDHIVPRALSGSTNDRSNLAAVCRACNHQKGAVPFAVWATSGEAHAGVSLEDAIKRVRLWQKGPGMSPKQHKAFQNEVISRLKSRKPDEEFDGRSMESVAWMAVELRTRIDGYYRKVNSDSVPKVGIYRGQLTAEARKASGFENRVNLIGGKGKTRFDRRHHAMDALVIAMMNQSVSQTLALRVNMRESQRITGQEETWKNFYGKPGQASERFEKWREGMLRAVELFNIELAKNAIPFHENVRLRVGSSKVHDDTVRKFIHAKLGEALSVAMIDCAETPALWTALTRLPDFDPKDGLPEDLSREIYIHSRKITADEQLNFFNSPSACLKVRGGYVEIGSSIHHARVYRIDGKKTTYSMVRVFATDLVKMTHEDVFTTPLKPSTISMRTADPKIRKALADGTATQIGWLVEGDELQLETDKYSGGLIGEVLAEYPQLTSWRVAGFYGVTQLRLRPYMLAAEGIPSDASESLRKVIEGKGWLPAINALLSSGCVKVVRRNCLGEPRFNAKSSLPVSQLLR

SEQ ID NO: 262 - protein, 1114 aa, Actinomyces turicensis
MQFHFYMVYVTMKGMNDKDASQQLRYRVGIDVGTHSIGFCAVEVDESGMPIQLLNSMVHKHDSGIDPGGNDTATTRLAEAGVARRTRRLIRRRKKRLQELDAFIEECGWPLVDLATITDARSPWRIRAHLATEHIDDEAEQGKLLSIALRHMARHRGWRSPYARISSLHIQADPSEQLKALAQRVSEKTGISLTADQTPAQLISVYLDVFETGKLRGPEGILGGKLMQSDNANELRRIATVQGLDNDLLKKIIGFVFAAESPKGSAAKRVGKDVLPGAHGLRAEKAHPAFQQFRIVSIVQNLRIKEGTGLRALTSEETEIVVDFLNQAGLTEAPTWEEVADNLEIPRSHLKGTATEGFDGIAPSTRPPFDVTSQKILNGKLKKLSAWWKDADYDHRCAMVNALSNVGSDDEGSLADDDVREFLSDFTDEELEALDKVELPGGRAAYSVDSLEKLTNTMLSEGCDLHSARKIAFGVDDSWTPPAEPIGQPVGNPAVDRVLKQVARWISAATNQWGTPESVNIEHVRDALGSEKASREYQRSLQTRRIRNEKLFAEMRERLDIGGKPRRSELTRYLALQRQNCQCLYCGMPITYTDAEMDHIVPRKGAASTNTRENFAAVCRACNHQKSNLPFAVWAEKTERPGVSVKEAYKRVSDMRIEPGMNGRQMNEFRKAIRLRLTTKHADAEIDGRSLESVAWMANELRHRIEGFYRSAENDVTVRVFRGAVTAEGRRASGFESRVNLIGGKGKTRLDRRHHAMDALTIALMEPGIAQTIALRMNMRESQRVLGEQETWKSFTGGSDTARKRWEHWCEEMLRASELFNVFLAEDRIPICQNKRLRLGSSAVHKAIVQPFEASDKRIVSDAMPVELIDRASTPALWTALTRDPDFDPKEGLPANPSRTIRLHDKRLGPNETVEFFPTAAACLAIRGGYCEIGAGIHHARIFRISGKKTTYAMLRVYQCDLVRFQKENLLTVELPANTISVRTAVPKLREALAHGTAEQIGWLVVGDELKIDLSGFTTGQIETFNETYPQATRWEVTGFPTKTQLRLKPLLIASEGLADDVPDDIVKIVKGPGWWPAIDKLLKIGNVVLYRRDTHGKPRVVSHRSLPLSSKLQ

SEQ ID NO: 263 - protein, 1113 aa, Alcanivorax sp.
MRYRVGLDLGTASVGAAVFSMDEQGNPMELIWHYERLFSEPLVPDMGQLKPKKAARRLARQQRRQIDRRASRLRRIAIVSRRLGIAPGRNDSGVHGNDVPTLRAMAVNERIELGQLRAVLLRMGKKRGYGGTFKAVRKVGEAGEVASGASRLEEEMVALASVQNKDSVTVGEYLAARVEHGLPSKLKVAANNEYYAPEYALFRQYLGLPAIKGRPDCLPNMYALRHQIEHEFERIWATQSQFHDVMKDHGVKEEIRNAIFFQRPLKSPADKVGRCSLQTNLPRAPRAQIAAQNFRIEKQMADLRWGMGRRAEMLNDHQKAVIRELLNQQKELSFRKIYKELERAGCPGPEGKGLNMDRAALGGRDDLSGNTTLAAWRKLGLEDRWQELDEVTQIQVINFLADLGSPEQLDTDDWSCRFMGKNGRPRNFSDEFVAFMNELRMTDGFDRLSKMGFEGGRSSYSIKALKALTEWMIAPHWRETPETHRVDEEAAIRECYPESLATPAQGGRQSKLEPPPLTGNEVVDVALRQVRHTINMMIDDLGSVPAQIVVEMAREMKGGVTRRNDIEKQNKRFASERKKAAQSIEENGKTPTPARILRYQLWIEQGHQCPYCESNISLEQALSGAYTNFEHILPRTLTQIGRKRSELVLAHRECNDEKGNRTPYQAFGHDDRRWRIVEQRANALPKKSSRKTRLLLLKDFEGEALTDESIDEFADRQLHESSWLAKVTTQWLSSLGSDVYVSRGSLTAELRRRWGLDTVIPQVRFESGMPVVDEEGAEITPEEFEKFRLQWEGHRVTREMRTDRRPDKRIDHRHHLVDAIVTALTSRSLYQQYAKAWKVADEKQRHGRVDVKVELPMPILTIRDIALEAVRSVRISHKPDRYPDGRFFEATAYGIAQRLDERSGEKVDWLVSRKSLTDLAPEKKSIDVDKVRANISRIVGEAIRLHISNIFEKRVSKGMTPQQALREPIEFQGNILRKVRCFYSKADDCVRIEHSSRRGHHYKMLLNDGFAYMEVPCKEGILYGVPNLVRPSEAVGIKRAPESGDFIRFYKGDTVKNIKTGRVYTIKQILGDGGGKLILTPVTETKPADLLSAKWGRLKVGGRNIHLLRLCAE

SEQ ID NO: 264 - protein, 1146 aa, Alicyclobacillus hesperidum
MAYRLGLDIGITSVGWAVVALEKDESGLKPVRIQDLGVRIFDKAEDSKTGASLALPRREARSARRRTRRRRHRLWRVKRLLEQHGILSMEQIEALYAQRTSSPDVYALRVAGLDRCLIAEEIARVLIHIAHRRGFQSNRKSEIKDSDAGKLLKAVQENENLMQSKGYRTVAEMLVSEATKTDAEGKLVHGKKHGYVSNVRNKAGEYRHTVSRQAIVDEVRKIFAAQRALGNDVMSEELEDSYLKILCSQRNFDDGPGGDSPYGHGSVSPDGVRQSIYERMVGSCTFETGEKRAPRSSYSFERFQLLTKVVNLRIYRQQEDGGRYPCELTQTERARVIDCAYEQTKITYGKLRKLLDMKDTESFAGLTYGLNRSRNKTEDTVFVEMKFYHEVRKALQRAGVFIQDLSIETLDQIGWILSVWKSDDNRRKKLSTLGLSDNVIEELLPLNGSKFGHLSLKAIRKILPFLEDGYSYDVACELAGYQFQGKTEYVKQRLLPPLGEGEVTNPVVRRALSQAIKVVNAVIRKHGSPESIHIELARELSKNLDERRKIEKAQKENQKNNEQIKDEIREILGSAHVTGRDIVKYKLFKQQQEFCMYSGEKLDVTRLFEPGYAEVDHIIPYGISFDDSYDNKVLVKTEQNRQKGNRTPLEYLRDKPEQKAKFIALVESIPLSQKKKNHLLMDKRAIDLEQEGFRERNLSDTRYITRALMNHIQAWLLFDETASTRSKRVVCVNGAVTAYMRARWGLTKDRDAGDKHHAADAVVVACIGDSLIQRVTKYDKFKRNALADRNRYVQQVSKSEGITQYVDKETGEVFTWESFDERKFLPNEPLEPWPFFRDELLARLSDDPSKNIRAIGLLTYSETEQIDPIFVSRMPTRKVTGAAHKETIRSPRIVKVDDNKGTEIQVVVSKVALTELKLTKDGEIKDYFRPEDDPRLYNTLRERLVQFGGDAKAAFKEPVYKISKDGSVRTPVRKVKIQEKLTLGVPVHGGRGIAENGGMVRIDVFAKGGKYYFVPIYVADVLKRELPNRLATAHKPYSEWRVVDDSYQFKFSLYPNDAVMIKPSREVDITYKDRKEPVGCRIMYFVSANIASASISLRTHDNSGELEGLGIQGLEVFEKYVVGPLGDTHPVYKERRMPFRVERKMN

SEQ ID NO: 265 - protein, 1552 aa, Anaerophaga sp.
MFSQRNNPYCELLQNVKQLYKEKFGKTNQVDNSIIYGFMKRILGLDLGTNSIGWALVENDENDRKGKIIGMGSRIIPMDMSELDNFNKGASISKTAERTRLRMTRRLRERHLLRRARLHRILNIMGFLPEHYRNSIDFIDKKGCFFEGQEPKIAYKPDKNSEQFCFLFTSSFHEMLEDFRKFQPELIQNRKKVPYDWTIYYLRKKALTQKISKEELAWIILNFNTKRGYYHLRGEDEDNQDNKKIKEFRALKVVNVTEREGANSSGKKWYDMELENGWVYSRQSNLPPNLEGKTIELIVSYTLDNNGNIKKDKNGKEKYSLSMPGEEDWNLVKIKTENDLKTSKKSVGEYIYDHLLKNPDQKIRGKLISTIERKFYKEELSRILKTQMNFYEELKNRELYQKCVEELYPNNKSHQQTLLQKDFIHLIVEDIIFYQRPLKSKRAFVNNCPLEYRVYVDKKSGELIKSGVKCIPKSHPLFQEFRLWQYVRNLRIYERERMVNGRLMVNVDVTNELLPDEEHIVRLFDLLNDRKSFKQDDVLRFVGIKSPKDRKRYSWNYPEDKELPGNETRHLILAWLKKVDGVPEDWLDPEKLKALWHLLYSVTDREEIIKGLHSFAKKYELPDTFVEHFKKIPRLEREYGSFSEKAIKKLLPLMRMGKYWKAEEIPADLLEKAQKIIDAEADDRISDEVREKLLHLKDISQLKGLPLWQASYLVYGRHSETGEVVKWRTSEDLEKYILQFKQHSLRNPVVEQVILEALRVVKDIWEHYGEGKEGFFNEIHVEIGRELKNPADKRKKITSQIQENENTNLRIKALLEELFNDPSVKNVRPYSPAQQEILRIYEDGVLNGQKEIPDDILKISKMARPSKSQLVKYKLWLEQKYRSPYTGEIIPLSQLFTSAYEIEHIIPQARYFDDSFSNKVICEAEVNREKGHQLAFEFITKRGGDEIELNFGKKVTILNVEEYQKFVKDHYGRSLRSLSKMRKLLMEDIPDDFIDRQLNDSRYISKVVRNLLSNIVRAEDENSLVSKHLITCTGGVTTRLKHEWGLNDVWNELITPRFVRLNKMGKEKFGEWINKKGKQVFQIQMPLELQKGFNKKRIDHRHHALDALVVACASRSHVNYLNNDSARANASETRYDLRNKLCYKDKTDSNGNYRWKFYKPWESFTEEAKNRLAGTVVSFKSNRRIMTRSSNRYFKWVDTSEGKKKKLVRQIKGDNQAIRKPLHKDTVLGKVSLRKEKKVSLSKAIDLWESIVDKPLKKRIQSLREQGYDKKLLLKYFKDRNNQFNGQDISRVNIYFFDNNLAARRVTLDASFNSEKRIDGITDSGIKKILYAHLQNEKYHGKKDEKGNEISPYELAFSPEGLEEMNANIKKLNGGKPHCPIYKVRLAETIGEKFKLGEKGNKNKKYVEAAKGTNLFFAVYVDEKGVRSFETIPFSVALERRKQKLAVVPEENENKEKLLFYLSPNDLVYVPDEDEKLIDYRQLSINPTRIYKMVSSSGTQCFFIPHFVASPIVQTMELGPNNKSERAWDGQMIKNVCYKLSVDRLGNVKIEK

SEQ ID NO: 266 - protein, 1515 aa, Anaerophaga thermohalophila
MKRILGLDLGTNSIGWALVESDEEQKSGKIQGIGSRIIPMDQNELDNFNKGNTVSQTAERTRLRMVRRLRERHLLRRERLHRVLKEIGFLPEHYLEQIDFTEKPGGFLPGKEPKIAYKPDNFKDKYDFLFQDSYHEMLSDFQDKNPEFIQKRKKVPQDWTIYYLRKKALTAKITKEELAWIILNFNQKRGYYQLRGEDEDVAKNTKKEEFHALKVVKVKEREDSEGASGKWYDIELENGWVYPRQSNIRPDWEGKILELIVTYNLDKDGNIKTDKEGNEKRSFRMPNKDDWTLRKKRTENEIEKSGKTVGEYIYDNLLDAPDLKIRGKLVSTIERKYYRSELEQILTAQKKYHPELSNSELFNKCISNLYPNNDIHRKALLSKDFVHLIINDIIFYQRPLKSKRSTVSNCPLEYRVYVDKVTGEKKKVPLKCIPKSHPLYQEFRLWQYVKNLRLFEKERFENGRLLTNVDVTEQFLPDEDKYVELFEFLNGRKTFKQDDILKFAGIKSAKDRVKYYWNYPQEKEYPGNETRYLIESRLKKIENVPDEWLNYEKIEELWHLLYSVTDKVEIEKGLQSFAAKYQLPDLFVEVFKGFPRMEREYGAFSKKAIKKLLPLMRMGKYWKLENINPDLIEKVQKIIDGEADDNINDGIRERFSEINEMSDLRGMPLWKASYLVYGRHSEAAEVIRWRTSADLDQYIKDFKQHALRNPIVEQVVLEALRVVKDVWNYFGEGREKFFDEIHVEIGRDLKNPADKRQKIANQIQENENTNLRIKALLVELFNDPEVQNVRPYSPVQQQLLKIYEDGVLNAERDIPDDIQKISRMANPTRNQLIRYKLWLEQKYRSPYTGEIIPLNKLFTSEYEVEHIIPRARYFDDSFSNKIISEAEVNRKKDRMLAFEFIKKLGGSTIDLNYGKKVSVLTVEEYQQFVKDHYGINPHSRLKMQKLLMDEIPESFIERQLNDSRYISKMVRNLLSNIVREENENSPVAKQLITCSGSITNTLKQEWGLNDVWNTIITPRFERLNKMGEQKYGEWVNKEGKPVFQIQMPLELQKGFNKKRIDHRHHALDALIVASATRSHVNYLSNEAAKTNAKDTRFDLRNRLCYKEKRGQNRNFTWRFYKPWNTFTEDAKNALNDIVVSFKSNHRVINKSTNRYFKWENLPGGMKKKRLVRQEKGDNWAIRQSLHKDTVLGKVSLRKVKPVSLSVALDSWNNIVDKALKKKIRSLKDQGYDKKLMLKYFKDRRNEYNGENISRVNVYYFDEEMAARRVDLDTSFNSEKRIEGITDSGIKKIIYAHLKNEKYHGQKDDKGKDISPYELAFSPEGIAEMNANIKQLNGGKPHCPIYKVRLAEPVGEKFQLGETGNKTEKLVEVAKGTNLFFGVYANDEGVRSFATVPFYLAVEREKQGLPAVPQENENGDQLLFWLSPNDLVYVPSEEDAHFANPKQIELDNSRIYKMVSSTGTQCFFIPHFVATPIVQTIELGPNNKSERAWDGQMIKKVCYKLSVDRLGNVEIE

SEQ ID NO: 267 - protein, 333 aa, Bacillus cereus
MMNPNNFTKEDFWRTIILYGLNQATYKIALGQSLIRFSEQQRNVVSMNELAEDFFDMYLERLKNGKPQLATPNRQTAMERIINSYNIGRLTRSQAIEKVEREAFNDVIDRFHTVDSLQVPMKFYEKTDKGIVIFDNVFEIFSDNNNFELRNELDARWDLLESAFEIKRTDSQLVNDIRKLYLANGYERTDITKNRSVLNGYQSNVCFYCGELMSDDDVHVDHVIPRQLINHDDIWNLVLSHGFCNQQKSDNLPDVNYIEKLIERNEYFIKSNHPISNKLKERLGNTPRRRRTTIDRIYEHAKLVLAPWKGIYGYNPATDPFYKTFIRNIVLSK

SEQ ID NO: 268 - protein, 1068 aa, Bacillus cereus
MRYVLGLDIGIASCGWAVINQEKERIEDLGVRIFDKAENPKDGKSLAAPRRDARSTRRTLRRKKHRMQRIKILLVKQGLLFKTELNHLYESATEFDVWNLRLDALERKLHPKEFARVLIHLAKRRGFKSNRKETTLSENGQILESISENQQIMEQQNYRTVGEMILKDKKFENHKRNKDGTYIGTVTRQQLQDEIQMIFHTQRLYKNDYATEEFESSYLEIWASQRPYASKDQIEKMIGYCTLEPKEKRTPKASWSFQYFVALQTINNLRLISKDKIEELSFEEKKQIMNLALEKPIVKYIDIRKLLSIPNDFQFNSLSYSADTVDTTLENKRCIELKEYHSINKVYKQVYGKNTPNLLPIDYDTIAYGLTIFKDDKDILEYLQNKYVNAKGKPIKNLAKKTYDDTFIQALLNLNFTKMGHLSFKALKNIIPFLEEGLSYDKACEKAGYNFKGTSYTERTKYLPVIPQNTNPVVHRALSQTRKVINAIIKKYGSPNAIHIETARELSKTFQERKEIDSRYQDNSKKNEHAIHKLKELGNINPSGINIVKFKLWSEQDGRCMYSGKYIEPHRLFEEGYTEVDHILPYSRSLDDSYNNKILTLGTENQRKGNKTPYEYMGNTSIWDEFETRVQSNKKINFKKQQKLLLQNFSYAREQEFIERNLNDTRYATIYLTSLIQQHLIFSESSSKKKVRTVSGIITSHLRSRWGFNKDRKEGHIHHALDAVIVAVTSNHMIQRVTKYYKLKELNKNLQAKQLPFPEPWEGFRLELEARISPNTQQYLKGIHFKNYADVNLSDIKPIFVSRMPKRSITGELHQETIRKFLGYNEKGKVLTAIKTKLEDIPFDANGDFPMYGKETDLYTYNAIKERYLSHEKDKRKSFQEPLYKPTKSGEIGPLIKSIKIMDTRTIVNPVNQGKGVVYNSKIARTDVFKKEDKYYLIPIYTIDLLKNILPHKAITAGKGYEDWTTIDSSFTFLFSLFPNDLIQIVPSKNKTIKARTTVSKKEILLPSLTGYFKGVHSGTAGITVETHDGSVIANVGSKQLLLFEKYQVDVLGHYTKIKEEKRMGMAI

SEQ ID NO: 269 - protein, 1078 aa, Bacillus cereus
MRYVLGLDIGIASCGWAVINQEKERIEDLGVRIFDKAENPKDGKSLAAPRRDARSTRRTLRRKKHRMQRIKVLLVKHGLLSKTELDHLYESATEVDVWNLRLDALERKLYPKEFARILIHLAKRRGFKSNRKETTLSENGQILESISENQQIMEKQNYRTVGEMILKDKKFENHKRNKNGTYVGTVTRQQLQDEIQMIFHAQRLYKNDYATEEFESSYLEIWASQRPYASKDQIEKMIGYCTLEPKEKRAPKASWSFQYFVALQTINNLRLISKDRIEELSFEEKKQIMNLALEKSIVKYIDIRKLLSVPNEFQFNSLSYSADTVDTAVESRKCIELKEYHSINKVYKQIYGENALNLLPKYYDTIAYGLTIFKDDKDILEYLQNKYVNAKGKPISNFANKTYDDTFIQALLNLNFTKMGHLSFKALKNIIPFLEEGLSYDKACEKAGYNFKGTSYTEQTKYLPVIPQNTNPVVHRALSQTRKVINAIIKKYGSPNAIHIETARELSKTFQERKEIDSMYQDNSKKNEHAIHKLKELGNINPSGINIVKFKLWNEQDGRCMYSGKYIEPHRLFEEGYTEVDHILPYSRSLDDSYNNKTLTLGTENQRKGNKIPYEYMGNTSIWNDFETRVQSNKKINKKKQQKLLLQHFSYAREQEFIERNLNDTRYATIYLSSLIQQHLIFSESSRKKKVHTVSGIITSHLRSRWGFNKDRKEGHIHHALDAVIVAVTSDHMIQRVTKYYKLKELNRNLQAKRMPFPEPWEGFRLELEARISPNTQQYLKGLRFKNYADVNLSEIKSIFVSRMPKHSITGELHQETIRKFIGYNEKGKVLTAIKTKLEDIPFDANGDFPMYGKESDLYTYNAIKERYLSHKKDKRKSFQEPLYKPTKSGGIGPLIKSIKIMDTRTIVNPVNQGKGVVYNSKIARTDVFKKEEKYYLIPIYTIDLMKNILPQKAITAGKGYEDWTTIDPSFTFLFSLFPNDLIQIVPSKNKTIKARTTVSKKEVLLPSLTGYFKGVHSGTAGITVETHDGSVIANVGSKQLLLIEKYQVDVLGNYTKIKEEKRIGLTTYNDNKKIAAC

SEQ ID NO: 270 - protein, 1088 aa, Bacillus smithii
MNYKMGLDIGIASVGWAVINLDLKRIEDLGVRIFDKAEHPQNGESLALPRRIARSARRRLRRRKHRLERIRRLLVSENVLTKEEMNLLFKQKKQIDVWQLRVDALERKLNNDELARVLLHLAKRRGFKSNRKSERNSKESSEFLKNIEENQSILAQYRSVGEMIVKDSKFAYHKRNKLDSYSNMIARDDLEREIKLIFEKQREFNNPVCTERLEEKYLNIWSSQRPFASKEDIEKKVGFCTFEPKEKRAPKATYTFQSFIVWEHINKLRLVSPDETRALTEIERNLLYKQAFSKNKMTYYDIRKLLNLSDDIHFKGLLYDPKSSLKQIENIRFLELDSYHKIRKCIENVYGKDGIRMFNETDIDTFGYALTIFKDDEDIVAYLQNEYITKNGKRVSNLANKVYDKSLIDELLNLSFSKFAHLSMKAIRNILPYMEQGEIYSKACELAGYNFTGPKKKEKALLLPVIPNIANPVVMRALTQSRKVVNAIIKKYGSPVSIHIELARDLSHSFDERKKIQKDQTENRKKNETAIKQLIEYELTKNPTGLDIVKFKLWSEQQGRCMYSLKPIELERLLEPGYVEVDHILPYSRSLDDSYANKVLVLTKENREKGNHTPVEYLGLGSERWKKFEKFVLANKQFSKKKKQNLLRLRYEETEEKEFKERNLNDTRYISKFFANFIKEHLKFADGDGGQKVYTINGKITAHLRSRWDFNKNREESDLHHAVDAVIVACATQGMIKKITEFYKAREQNKESAKKKEPIFPQPWPHFADELKARLSKFPQESIEAFALGNYDRKKLESLRPVFVSRMPKRSVTGAAHQETLRRCVGIDEQSGKIQTAVKTKLSDIKLDKDGHFPMYQKESDPRTYEAIRQRLLEHNNDPKKAFQEPLYKPKKNGEPGPVIRTVKIIDTKNKVVHLDGSKTVAYNSNIVRTDVFEKDGKYYCVPVYTMDIMKGTLPNKAIEANKPYSEWKEMTEEYTFQFSLFPNDLVRIVLPREKTIKTSTNEEIIIKDIFAYYKTIDSATGGLELISHDRNFSLRGVGSKTLKRFEKYQVDVLGNIHKVKGEKRVGLAAPTNQKKGKTVDSLQSVSD

SEQ ID NO: 271 - protein, 1069 aa, Bacillus thuringiensis
MNYDIGLRIGITSCGWSIINKDLERIEDLGVRVFEKAENPDGTASAAPRREARKSRRKHRRKKHRIERIKRLIVQHDLLSKKELDSLYLSPFNIDVWNLRVEALERKLDNREFARVLIHLVQRRGFQTIRKSVEIQEEGKLLENVSENERIMKVNGYKTVGEMFSKHEKFTHHKRNKDGSYTSVVTRSLLLKEIKTIFNSQRILGNVFSTQKLESDYLYIWGSQRPTLTYEQLMSMVGNCIYEKKEKRAPKTSWAFQYFSLLQKINKLKVSDDNTLRKLSKEERDIVIELAFKKKNVSFVDIRKALKLNDNTKFNHLTYSHVVETKKVEKATFIELKGYHLIKKQLKDRNVELTQELQPKDYDAIAAASTFFKNDIEFRDYLRNQYLDSNGKRKSNIANKVFEDKVIAAVFELNFSKVCHLSFKSLYKLIPHLEKGLDYKEAILCAGYNFRDENKRDKKLFLPVIQQETNPVVHRALTQARKVINAIIREYGSPNTIRFVVANDLAKTYKQRKELESTLKKNRAENEKIKTKLLSMGIINPTGMDIVKYKLWYEQSGICLYTGRQMELSSLFKPGYSIVNHIIPYNRSFDDTYHNRVLTLTETKYEKGNKIPFEYFGAEETCWNEYEKRVSTSKKIHDKKREKLLIRNFDIEYENEMISNNVFDTHYIGSYFEKYIDEHLQFKKSTKKQKVFSIHGNMVAHLHSRWGFNKNSREIYLNHAVDAAIVAVLTDQLIRNIADYYRRDNILEQKGSLKFPEPWKSFSIELEARISPQVRDLIKKLNLDSYLDVDILHIKPVFISKKPRRKVNGEAHKSTIRSLIGINEIGKTVTCIKTRLEDIPFDENGDFPMYGKDTDKYTYTAIKERYLEFNKDKEKAFSTPLYKLKRNGEPGNQIKSVKIIDTRNIVNKVNQGKGIAYNSNIIRVDVFSRDQKYYVVPIYLRDFIKGSLPNKIITAAKGFMQWPETDNSYTFLFSIFPNDLIKVVPKEGKFIKAKNENKENINLTEILGYFKGLDSSTGAFTLESHDGSLLARGIGTKNLLLIEKYQVDVLGRYNKVGNEERQDIKIQQN

SEQ ID NO: 272 - protein, 206 aa, Bacteroides cellulosilyticus
MKKILGLDLGCNSIGWALVNEAENTEEISSIIKLGVRVNPLTVDEMQNFEKGKSITTNADRTLKRSMRRNLQRYKLRRDTLIEVLKEHGFITDSTLLSEHGNKTTFETYRLRAKAAVEEISLEKFARVLLMINKKRGYKSSRKAKGSEDGVLIDGMDVARKLYEEGLTPGELCLQILEAGKKNLPDFYRSDLQNEFDRIWNFQKLV

SEQ ID NO: 273 - protein, 349 aa, Bacteroides coprosuis
MKKILGLDIGTNSVGWAVVNTNQEGEPSQIEKLGSRIIPMSQDILDKFGQGQTVSSTASRTDYRGIRRLRERSLLRRERLHRVLHILDFLPKHYADSIGWDPRNSKTYGKFLPGTEVKLAWVPTADGHQFLFYSTYLEMLEDLKQTQAQLFETSQTPVPLDWTIYYLRKKALTQPITKHELAWLLLHFNTKRGYYQRRGELEDTPTDKLVEYHALKVVDVEVDPEDQSKKPWYFVHLENGWIYKRQSSEPLDNWKGLVKEFIVTTHLDKEGKPKLDKEGEVRRSFSSPKEDDWTLVKKKTENDLEKSGLTVGAYIYQTLLNKPNQKIRGGLIKHIERNYYVEELEQILR

SEQ ID NO: 274 - protein, 1504 aa, Bacteroides coprosuis
MKKVLGLDIGTNSVGWAVVNQNDKGEFLSIEKIGSRIIPMSQDVMDKFGAGQTESSTAQRTQYRGVRRLRERSLLRRERLHRVLHILHFLPQHYDAAIGWNKKENKTYGKFLPGVEVNIPWVATDQGHQFIFMDSYAEMLKDLKQHQPHLFEKSSTPVPLDWTIYYLRKKALTQAISKEELAWILLNFNQKRGYYQLRGEEVEDNTKREEFYALKVVKVELDKDNTSAKTWYKVHLENGFIYPCPSDTPIDSWVGMVKDFIVTTTLEKDGSEKRTADGEIKRSFRAPKEDDWTLLKKKTESELEKSGKQVGAFIYDTLLSNPDQKIIGGLIKTIERKYYKKELEQILETQQKFIAELSDKKLFQACAEELYPLNDSHRENLLERDFKHLFVQDIIFYHRPLKTKKSLISNCTYEYRTFYKNGEKQISPIKCIAKSNPLFQEFRVWQFVQNLRILQRQRSEGDSIKYNVDVTAEFLKDENDIANLFTWLNERKVIKQDQLLKSYFKLKVNKETKELDYRWNYVDDKNKEYPCNATRTHILSFLEKCKEEKRIEDDRFVYSLWHLLYSVVEPIELRGALAKFAEREHLHPSFVDVFAQFPPLEKEYGSYSEKAIKRLLPLMRMGDYWHEDKIDVKTKQRIQRIIDGEADDDITHRSREKVENLRSITDFKGLPLWKAGYVVYNRHSESGELTKWKTPHELSNYIQNEFKQYSLRNPIVEQIVLETLRVVHDLWVKHGDFSEIHLELGRDIKNSSDKRKRMAERQQENENSRQRVLEMLIDLKKEAAFADLNPYSPSQQEKLRIVEDGVLRSNIEIPKDIEKITKSAKPTSRELTKYRLWLDQKYRSPYTGQPISLAQLFTSKYEIEHVIPQAKYFDDSFTNKVICESEVNKEKGSMLAHEFILKNGGSTVNVGGRQVQVLKNDAYVELINRLYGKNNPVKAKKLLAEDIDEVVGDFSERQLNDTRYISRVVQKLLSNIVREEDEQESTSKHVIGCSGQVTTALKKDWGLNDIWNKIIQPRFERLNEMTATEDYGVWQSPNHFQIRVPEEIQKGFTKKRIDHRHHAMDALVIACATRSHINYISNRSGQDRNAKFETTRTDLRSKLCYKENSSGNNYNYIFNKPWDTFTQDAHRALENIVVSHKQNLRVLTKTNNYTQFINKDGKKDLQKQVKGDHFAVRKPMHQETIYGRVSIRSIKEVALKKALENWKQIVDRTLKDKIRELIGAYGKYDAQTILKYFKDRDYKFNNLKINRVEVYEYDHNCAAVRKSIGDDLTIKQIERITDESIRKILMNHLSNYDDNLKEAFSPEGLMEMNKNIKELNGGKNHQPIYKVRLFEDLGSKFPLGVSHNNPDKYAIAAKGTNLFFGIYEDQEGKRMFDSIPLNIVIDRLKEKKSPVPETYNESKLKFHLSPNDLVYVPTDEEQKQPELVDVDHLSDEQKGRVYKAVSFTGNRAFFVNHRVSKVIHDYVEFGTKNKIENDDDKRSLKHICWKLKVNRLGEITDVKR

SEQ ID NO: 275 - protein, 1509 aa, Bacteroides eggerthii
MKTILGLDLGTNSVGWAVINSVIKEQAERIWIEMAGSRIIPMDAAVLGDFDKGNSISQTSERTRLRGARRLRERQLLRRERLHKVLNILGFLPNHYLEYIDFEKHPGKFLADAEPKLAWVKDEQGKYTFLFQAAFDEMLADFAIHQPSLVSGDKKIPYDWTIYYLRKKALTEMISKEELAWILLNFNQKRGYYQLRGEEEEDNAGKSVEFYALKVLTVEATDEKKGRDVWYNVHLENGWIYRRSSSVPLDWEGQVKEFIVTTDLNPDGTPKLDKYGEVKRSFRAPKEDDWMLIKKRTEADIANTHKTVGAYIYDTLLQKPQQKIIGKLVKTVERKLYRDELSLILQKQCAFHAELQDRALYARCVEALYPSNEVRRKNIANRDFVYLLMDDILFYQRPLKTKKSLIANCPYEENEYVDRETGEIKKTPLKCIAKSHPLFQEFRLWNFLSNIRIYQKEKEINGTLHLDVDVTAEFLKTEDDYVALFDWLNSRKEIEQKTFLKYPKFGLKKEISNYRWNYVEDKQYPCNETRHAILSSLEKANVCIDFLSNEKEVALWHILYSVSDKQEIEKALRTFAAKNGLDESFVEAFKKFPPFKSEYGAYSAKAIKKMLPLMRCGKYWDVSSIDDTTKERIKKIVTGEYDERISVKVRDKVMNLSDISCFRRLPLWLACYIVYNRHSEDKEAVKWESPADIDAYLASFKQHSLRNPIVEQVITETLRVVRDIWKQVGRIDEIHIELGREMKNPADKRKRMTAQILENENANLRIKALLAEFMNPEYEIENVRPYSPSQQEILRIYEDTVLHAEDQLPEEIDAILKKFNSSKVPTKSEFLRYKLWLEQKYRSPYTGELIPLGKLFTAAYEIEHVIPQSRYFDDSFSNKVICESAVNKLKDNQLGYEFIKNHHGQKVEVGFGKSVEIFSVDSYERFVKEQYAKSAVKMKKLLMDDIPEQFIERQLNDSRYISKVIKGLLSNIVREKNDSGEYEPEAVSKNIVVCTGSVTDRLKRDWGMNDVWNSIVYPRFERLNSLTDTQSFGHWENKSGKKVFQTELPLEYQKGFSKKRIDHRHHAMDAIVIACATRNHVNYLSNESASRNAKISRYDLQRLLCDKNRTDDNGNYKWVIKKPWDTFTQDAREVLSKIVVSLKQNLRIINKTTNVYRHLDATGNRVYEKQKTGDSWAIRKPMHKDTVFGAVNLRKVKVVRLSVALDTPAMIVDKRVKNKVFELLSYKYDKKRIEKYFKENAFLWKELDLAKVAVYYFTEATTEPLVAVRKPLDSTFNEKKIKESVTDTGIQKILLNHLCTKEGKPDLAFSAEGIEEMNRNLLQLNNGKSHQPIYKVRVYEPRGNKFSVGVLGNKGTKWVEAAKGTNLFFAIYITEDGKRTYETIPLNVVIEREKQGLVPVPDRNKKGDKLLFWLSPNDLVYLPTEEEREFGRINEPIDRGRIYKMVSCTGNEGHFIPANVANPIVPVIELGSNNKAQRAWTNEMIKDICIPIKVDRLGHIIEVKYRIDE

SEQ ID NO: 276 - protein, 1526 aa, Bacteroides faecis
MKKILGLDLGTNSIGWAVLNAADDNSLKYIEAAGSRIIPMDAAILGDFDRGNSISQTAERTRIRGMRHLRERYLLRRARLHRILNLLGFLPFHYAQDIDRYGNFSADMEPKIAWCKNLEGELEFIFIESFNEMLEDFRKNQPELVADNKKVPYDWVIYYLRKKALEKKISKEELAWILLNFNQKRGYYQLRGEDDDESMKTAKTRQYFDKQIIKNIIDTNQTYKGQRILIVELQNGDKGKIFKKEIPDWIGQEKNIIVTVDIDKDGNDKYEESGSLSCRFKIPTDAEWESEWKLIKMKTQKDLDESNKTVGTYIYDSILQNPTQKVRGKLVRTIERKYYKAELKQILEKQTEFHSELQDKDLYIECLNELYSNNDTHRNAITDRDFVYLFMNDILFYQRPLKSKKSLIDNCPYERNIYIDKETGEIKYSPIKCIAKSHPLFQEFRLWKFISSIRIYQRESVVEVVDKQLDLFSSQSTSVQKLVTDVDVTDKFLTCENDYVALFEWLNKKKIIDQKEFLKYRPFGLKGDIDNYRWNYVEDKSYPCNETHAMILTYFAKAGISEDILTKEMEEALWHILYSVEDRQEITKALRTFASKYHLSDSFVKVFSNIPPFKKEYGSYSAKAIKKLLSLMRMGKYWSEDAIDVNTRERIDKIVTGEYDEKIRDRVREKTIRLNDIRHFRALPDWLACYVVYDRHSETREITEWKSPEEIDEYIRNFKQHSLRNPIVEQVITETLRTVRDIWKQVGCIDEIHVELGREMKNPADKRKRITSQIIENENANLRVKALLTEFVNSEFEIENVRPYSLSQQDILRIYEDGVLNSVAEVPGDIAGILKKFNENDAKKRPTTSEILRYKLWLEQKYRSPYTGEMIPLSKLFTSAYEIEHVIPQSRYFDDSFSNKVICEAEVNKLKDNALGYEFIKKHHGEKVELGFGKIVEIFSVSVYEQFVKDNYSRNRGKMKKLLMDEIPEQFIERQLNDSRYISKVVKTLLSNVVREKAEQEAVSKNVIVCTGGVTDRLKKDWGINDVWNKIVLPRFLRLNELTNSTNFTAKNAAGNEIPAMPLELQKGFNKKRIDHRHHAMDAIVIACANRNIVNYLNNESASRKAKISRHDLQAILCDKVRTDDKGNYQWRVKKPWDTFTQDVYVALENIIVSFKQNLRVINKTSNYYWHYENGKKVLVKQVKGDSWAIRKPMHKDTVFGEVNLRKVKSVSLNEALKNPQFIVEKDLKRQLLSLLQQNFDIKKIKKYFEEHKDIWSDISLSKMNIYYFTKETKDRYFATRKPLDASFDKKKIESCITDTGIQQILLRHLELKENDPERAFSPDGIDEMNRNIIQLNKGKGHHPIAKVRVYEKADKFEVGQRGNKSSKFVEAAKGTNLFFAVYETEYPDEKTNSIVRKRNYATIPLNIAIERQKRGLSTAPEDEKGNVPSFVLSPNDLVYLPTSEDIVNGHITQPIDKSRIYKMVSSSGSQCFFIKHNIANIIVDKYEFSPLNKMERAISNEMIKEICIPVKVDRLGNIVKLGKSE

SEQ ID NO: 277 - protein, 1509 aa, Bacteroides fluxus
MKTILGLDLGTNSVGWAVINSVIKEQAERIWIEMAGSRIIPMDAAVLGDFDKGNSISQTSERTRLRGVRRLRERQLLRRERLHKVLNILGFLPNHYLEYIDFEKHPGKFLSDAEPKLPWVKDEQGKYTFLFQAAFDEMLADFAIHQPSLVSGDKKIPYDWTIYYLRKKALTEMISKEELAWILLNFNQKRGYYQLRGEEEEDNAGKSVEFYALKVLTVEATDEKKGRDVWYNVHLENGWIYRRSSSVPLDWEGQIKEFIVTTDLNPDSTPKLDKYGEVKRSFRAPKEDDWMLIKKRTEADIANTHKTVGAYIYDTLLQKPQQKIIGKLVKTVERKLYRDELSLILQKQCAFHAELQDRTLYARCVEALYPNNEVQRRNIANRDFVYLLMDDVLFYQRPLKTKKSLIANCPYEENEYVDRETGEIKKAPLKCIAKSHPLFQEFRLWNFLSNIRIYQKEKEINGTLHLDVDVTAEFLKTEDDYVALFDWLNSRKEIEQKTFLKYPKFGLKKEISNYRWNYVEDKQYPCNETRHAILSRLEKANVCIDFLSNEKEVALWHILYSVSDKQEIEKALRTFAAKNGLDESFVEAFKKFPPFKSEYGAYSAKAIKKLLPLMRCGKYWDVSSIDDTTKERIKKIVAGEYDERIAVKVRDKVMNLSDISCFKRLPLWLACYIVYNRHSEDKEAVKWESPADIDAYLASFKQHSLRNPIVEQVITETLRVVRDIWKQVGRIDEIHIELGREMKNPADKRKRMTAQILENENANLRIKALLAEFMNPEYEIENVRPYSPSQQEILRIYEDMVLHAEDQLPEEIDAILKKFNSSKVPTKSEFLRYKLWLEQKYRSPYTGELIPLGKLFTAAYEIEHVIPQSRYFDDSFSNKVICESAVNKLKDNQLGYEFIKNHHGQKVEVGFGKSVEIFSVDSYERFVKEQYAKSAVKMKKMLMDDIPEQFIERQLNDSRYISKVIKGLLSNIVREKNDSGEYEPEAVSKNIVVCTGSVTDRLKRDWGMNDVWNSIVYPRFERLNSLTDTQSFGHWENKSGKKVFQTELPLEYQKGFSKKRIDHRHHAMDAIVIACATRNHVNYLSNESASRNAKISRYDLQRLLCDKSRTDDNGNYKWVIKKPWDTFTQDAREVLSKIVVSLKQNLRIINKTTNVYRHLDATGNRVYEKQKTGDSWAIRKPMHKDTVFGAVNLRKVKVVRLSVALDAPTMIVDKRVKNKVFELLSYKYDKKRIEKYFKENAVLWKELDLARVAVYYFTEATTEPLVAVRKPLDSTFNEKKIKESVTDTGIQKILLNHLCTKEGKPDLAFSAEGIEEMNRNLLQLNNGKRHQPIYKVRVYEPRGNKFSVGVLGNKGTKWVEAAKGTNLFFAIYITEDGKRTYETIPLNMVIEREKQGLAPVPDKNEKGDKLLFWLSPNDLVYLPTEEELEFGRINEPIDRGRIYKMVSSSGNQCFFIPQSISNAIIPTKELGANNKAERSWDGAMIKNICIPVKVDRLGRIIEVKYRINE

SEQ ID NO: 278 - protein, 1436 aa, Bacteroides fragilis; identical to SEQ ID NO: 155

SEQ ID NO: 279 - protein, 1512 aa, Bacteroides nordii
MKNILGLDLGTNSIGWAVINSEEDGPIVKKRIELAGSRIIPMDAAVLGNFDSGVTKSQTAERTSFRSIRRLRERQLLRRERLHKVLQILGFLPEHYVNDIDFENHPGKIKRNTEPKLPWRKNSMGQFEFIFQDSFEAMLTDFATHQPVFVSEGKKVPYDWTLYYLRKKALTEGISKEELAWLILNFNQKRGYYQLRGEEEEEQSNKLVEFYALRVVKVEATDDKKGKDTWYNVHLENGWIYRRTSNIPLDWEGKVKEFIVTTDLNEDGTPKLDKYGEVKRSFRAPKEDDWTLIKKKTESDIANSHKTVGCYIYDALLQNPHQKIKGRLVRTVERKFYKEELRLILEKQLSFHPELQDRDLYRACIDALYVSNEAHKNNISGRDFVYLFIDDIIFYQRPLKTKKSLIDNCPYEENQYMDRETGEVKQAPIKCIAKSHPLFQEFRLWQFISNIRIYQRERVLDDGKLETDVDVTPDFLKTEDDYTTLFEWFNDRKEVDQKAFLKNPQFGLKKTFTEYRWNYVEDKSYPCNETRNAILNGLQKAGVSADFLSREVEEALWHILYSVEDKIEIESALRKFASKHDLDDRFADVFKKLPPFKKEYGAYSAKAIKKLLPLMRIGKYWELSNIDDKTKERIDKIITGEWDENIHDRVREKAIKLSDITDFKGLPLWLSCYVVYNRHSEARAIAKWESPEDIDSYLRLFRQHSLRNPIVEQVITETLRTVRDIWKRVGQIDEIHVELGREIKNPADKRAKMTAQIVENENTNLRIKALLAEFINSEYEIENVRPYSSNQQEKLKIYEDTVLNGVKEIPEDINTILKKFRESDLKKRPTKSDFLHYKLWLEQKYCSPYTGRIIPLGKLFTSAYEIEHIIPQAHYFDDSFSNKVICEAEVNGLKDKKLGYEFIKHNPGKMVEIGFGKPPVRIFSVEEYERFVKENYSGIKNKMNKLLMDDIPETFIERQLNDSRYISKVVKSLLSNIVREKDSNGEYEPEAISKNVIVCTGSVTDRLKRDWGVNDVWNSIIYPRFERLNELTGSQQFGCWENKEGKRVFQTAVPLEMQKGFSKKRIDHRHHAMDAIVIACATRNHINYLSNESASKKAKISRTDLQRLLCTKCRTDDNGNYKWIVKKPWPAFTQDIRKALENITVSFKQNLRVINKTTNYYVHFDESGKKVLEKQINGDSWAIRKPMHKDTVFGKVNLQKVKEVRLSLALDTPKMIVDKKLKEKVLQLYSYKYDKKRIDKYFKENASLWKDLNLSKVAVYYFTNDSTEPLVAVRKPLDTSFNAKKIKESVTDTGIQKILLNHLSNNQDDPNLAFSPDGIDKMNKNLTALNDGKYHQPIYKVRVCEPQGNKFSVGTSGNKTSKYVEAAKGTNLFFAVYQTEDGKRSYETIPLNVVIEREKLGWTPVPENNNNGDKLLFWLSPNDLVYVPTADELNNGMRLDNMDKGRIYKMISCSGPQCFFIPQNVSNAIIPVIELGANNKAEKSWNNEMIKVVCVPIRVDRLGCITQINNQK

SEQ ID NO: 280 - protein, 779 aa, Bacteroides oleiciplenus
MKEGNQYDVACEYAGYRHSKSSLTREEIDNKVLKNRLEILPKNSLRNPVVEKILNQMVNVVNAVIDTYGKPDEIRVELARELKKGAKEREELAKSIAQNTREHEAIRQLLQTEFGMMHVTRNDIIRYKLYEELKDNGYKTLYSDQYIPREKVFSKEIDIEHIIPQARLFDDSLSNKTLEYRAVNIEKGNKTAYDFVKEKYGNDGLRRYLNHCEALFKDKKTKLKKLKMEDQDIPDGFIDRDLRNTQYIAKKALSMLSEISRRVVATTGSITDELRKDWQLVDIMKELNLPKYEALGFVETFKDKDGRIIKKIKDWSKRNDHRHHAMDALTVAFTKDVFIQYFNNKNAFWMSGSKEHANITAIKNKYFEKGKALAPIPLELFRTEAKHHLENILVSIKAKNKVVTNNINRTKKKNGENLKLQQTPRGQLHLESIYGSYRQCIIRDEKVNASFDASKIANVSKSAYRNALLKRLEAYDNDPKKAFTGKNSLDKNPVYLDENKMEKVPDRVKIVEFETVYTIRKPIDPKLSIDKVVDARIRTLLKKRLEEYGGDAQRAFSNIEENPIWLNKEKGISVKRVAIRGISNAQALHDKKDKDGNPILDKEGKGIPTDFVNTSNNHHVAIYRKPVVDKMGQVILDENGSPRYELGEDVISFFEAVARVNLRQPVVDKDYKRSEGWQFLFSMKQNEYFVFPNEKTGFNPKEIDLLNPENYALISPNLFRVQKIGLNDYTFRHHLETSIQNNSNELKFITWIRCGKNGINGVIKVRVNHIGQIVSMGEY

SEQ ID NO: 281 - protein, 653 aa, Bacteroides oleiciplenus
MKKILGLDLGSSSIGWALVNEGANDEEKSSIIKLGVRVNPLTVDEAQNFEKGKSITTNADRTLKRGMRRNLQRYKQRREALVEVLKKHEFITAGTLMSEQGNKTTFETYRLRAKAVEEEISLEEFARVLLMINKKRGYKSSRKAKGDEDGVLIDGMDVAKKLYDEDLNPGELCLQLLEAGKKTLPDFYRSDLQDEFDKIWNFQKQFNPESFCDTAKEEVRGKNRTQTWTILSKYFVWTEGDSVWNNEEARTEERIKEYKLVGIKRTTKGYEQKLENYRWRVQALSEQLNPEIIAIVLQEINGQISASSGYLGAISDRSKELFFNHQTVGQSLMSELDKNPNGSLRNKVFYRQDYLDEFNTIWEKQSLYHKELTVELKKEIRDIIIFYQRRLKSQKGLISTCEFEQREIIVEKDGKRKTKIIGCKVIPRSHPLFQEFKIWQTLNDVEVYVADRRTKRKQDRKSTTLFSDTEDILLVEGKRYLYQEEKELLAKELFVRENMKKAEVLKLLFEDPKELDLNFKQIDGNRTGFALFSAYSKMIEKYGYESVNFKNSADEIIEKLQIIFADLGWNTELFSIDLSKDDKELEKQPYFRLWHLLYSFEGDNTPTGNGKLIEALMRLCSVEKEYASVLANVSFQEDYGSLSAKAIKKYYLI

SEQ ID NO: 282 - protein, 1436 aa, Bacteroides sp.
MKRILGLDLGTNSIGWALVDEAENKDERSSIVKLGVRVNPLTVDELTNFEKGKSITTNADRTLKRGMRRNLQRYKLRRETLMEVLKEHKLITEDTILSENGNRTTFETYRLRAKAATEKISLEEFARVLLMINKKRGYKSCRKAKGAEEGTLIDGMDIARELYNNNLTPGELCLQLLDAGKKYLPDFYRSDLQNELDRIWEKQKEYYPEILTEVLKEELRGKKRDAVWAICAKSFVWEEYYTEWNKEKGKTEQQEREHKLEGIYSKRKRDEAKRENLQWRVNGLKEKLSLEQLVIVLQEMNIQINNSSGYLGAISDRSKELYFNKQTVGQYQMEMLDKNPNASLRNMVFYRQDYLDEFNTLWEKQAEYHKELTGELKKEIRDIVIFYQRRLKSQKGLVGFCEFESRQIEVEIDGKKKIKTVGNRVIPRSSPLFQEFKIWQILNNIEVTVVGKKGKRRKQKDNSPTLFDGLDDTEQLELNGSRYLYQEEKELLAQELFVRDKMTKSDVLKLLFDNPQELDLNFKTIDGNKTGYTLFQAYSKMIEMSGHEPVDFKKTVEKVVEHVKAVFDLLNWNTDILGFNSNEELDNQSYYKLWHLLYSFEGDNTPTGNARLVQKITELYGFEKEYAIILANVTFQDDYGSLSAKAIHKILPHLKEGNRYDVACAYAGYKHSESSLTKEEIANKALKDRLTLLPKNNLRNPVVEKILNQMVNVINAIIDTYGKPDEIRVELARELKKNAKEREELTKFIAETTRKHEEFKILLQSEFGLTNVSRTDILRYKLYKELESCGYKTLYSNTYIPREKLFSKEFDIEHIIPQARLFDDSFSNKTLEARSINLEKGNKTAYDFVKEKFGESGADNSLDHYLNNIEDLFKSGKISKTKYNKLKMAEQDIPDGFINRDLRNTQYIAKKALSMLNEISRRVVATSGTITDKLRQDWQLVDVMKELNWEKYKALGLVEYFEDKDGRQIGRIKDWTKRNDHRHHAMDALTVAFTKDIFIQYFNNKNASLNSNTNEYAIKNKYFQNGRAIAPIPLREFRVEAKKHLENTLISIKAKNKVVTGNINKTKKRGGVNKYLQQTPRGQLHLETIYGSGKQYLTKEEKVNASFDMKKIATVSKSAYRDVLLKRLHENDNDPKKAFTGKNSLDKQPIWLDKEQTRKVPEKVKTVTLETIYTVRKEISPDLKVDKVIDAGVRKILTGRLNEYGNDAKKAFSNLDENPIWLNKEKGISIKRVTISGISNAQSLHVKKDKDGKPILDEDSRNIPVDFVNTGNNHHVAVYRRPVIDKRGQLVIDEAGNPKYELEEVVVSFFEAVTRANLGQPIIDKDYKTSEGWQFLFSMKQNEYFVFPNEKTGFNPKEIDLLDAENYGVISPNLFRVQKFAHKNYVFRHHLETTIKDTSSILKGITWIDFRSSKGLDAIVKVRVNHIGQIVSVGEY

SEQ ID NO: 283 - protein, 1510 aa, Bacteroides sp.
MKRILGLDLGTNSIGWALVDSEEQRILGMGSRIIPMDQGVLDTFSGGNPVETQTAARTAYRGTRRLRERALLRRERLIRVLNMMKFLPEHYASQIDFEKRLGQFFDEKEPKLAWKQNDEGRFEFIFQQSFNEMIEEFKNKGVVREDKKIPYDWTIYYLRKKALSQEIEKEELAWILLNFNQKRGYYQLRGEEEEENPNKLVEYYSLKIVDVIADEKPNSKGDIWYSLHLENGWIYRRSSKIPLFGWKDKTRDFIVTTDLNDDGTVKKDKEGIEKRSFRAPSENDWVLLKKKTESDIEKSHKTVGAYVYETLLQNPMQKVRGKLVRTIERKFYKDELKQILEKQREFHPELRDEDLYNDCVRELYRSNETYQFILSKRDFVHLFLDDILFYQRPLRSQKSAIGDCILEFKTYKDKDGNNIKEYLKVISKSNPLYQEFRIWQWLYNLKIYRKEDDEDVTLQFIANIEDKEQLFDFLSNRKSIEQKPLLEYLIKAKGLKKQVKTEAYRWNYVEDKIYPCSETKTMISTRLAKVENIPDNFFTKEIEQKLWHIIYSVTDKNEFEKALRTFAKKYDLDIASFVDNFKKIPPFKNEYGSFSEKAIKKLLPLMRLGKYWKWNDIDNNTQNRISKIITGEYDEEIKDIVREKSIALTNENDFQGLQLWLAQYLVYGRHSEADIAGKWHSVADLEKYLNEFKQHSLRNPIVEQIITETLRVVRDIWRKYGQGAENFFSEIHVELGRDMKNTADERKKIVNVVTENENTNLRIKALLMELKNNSDGKLEVENVRPYSPTQQDILKIYEEYAISTGLDNEKDEKVKEDIKKISRVAQPTTTELQRYKLWLEQKYCSPYTGKVIPLGKLFTEEYQIEHIIPKSRYYDDSFSNKVICEAAVNKLKDKCLGLEFIKNYHGQIVETGFGQKVTIFDEEAYQNFVKQHYAYNRSKRTKLLLEEIPEKMIERQMNDTRYISKFVLPLLSNLVRAEENDNGVNSKNVLPVNGKITTMLKQDWGLNDVWNDLILPRFVRMNELAKTIAFTSWNEQHQKYLPTVPLELSKGFQKKRIDHRHHAMDALVIACATRDHVNLLNNKHANTDTIRYDLQRKLRLFERVTYIDPQTKNNVTKDIPKEFKKPWDNFTVDARNELEKIIVSFKQNLRIINKATNIYTKYENGKKIKVGQKGLNWAIRKPLHKETVFAKVSLRKRKTVRLSEALKDWKKIVDKKLKQEIKRLTCQYGKFDVDTILRYFKDRKYQFGEVDVSKVKMYYFDEENAAVRKNVDTSFTEKFIQGSVTDTGIQKILLNHLEAKGNKVEIAFSPEGIEEMNKNIIQLNEGKLHLPIFKVRVYETIGNKFSVGVKGNKKDKYVEAAKGTNLFFAIYVDENGIRSYETIPLNIVIERLKQGLSVVPEKNRKEHSLLFYLSPNDLVYVPIEDERENIHAVNLDQLNNEQRKRIYKMVSCTGSECHFVPYYVASPIVNKVEYSSLNKIGRSLTGEMIKDVCIKLKVDRLGNVKGISGL

SEQ ID NO: 284 - protein, 1436 aa, Bacteroides sp.
MKRILGLDLGTNSIGWALVNEAENKDERSSIVKLGVRVNPLTVDELTNFEKGKSITTNADRTLKRGMRRNLQRYKLRRETLTEVLKEHKLITEDTILSENGNRTTFETYRLRAKAVTEEISLEEFARVLLMINKKRGYKSSRKAKGVEEGTLIDGMDIARELYNNNLTPGELCLQLLDAGKKFLPDFYRSDLQNELDRIWEKQKEYYPEILTDVLKEELRGKKRDAVWAICAKYFVWKETYTEWNKEKGKTEQQEREHKLEGIYSKRKRDEAKRENLQWRVNGLKEKLSLEQLVIVFQEMNTQINNSSGYLGAISDRSKELYFNKQTVGQYQMEMLDKNPNASLRNMVFYRQDYLDEFNMLWEKQAVYHKELTEELKKEIRDIIIFYQRRLKSQKGLIGFCEFESRQIEVDIDGKKKIKTVGNRVISRSSPLFQEFKIWQILNNIEVTVVGKKRKRRKLKENYSAIFEELNDAEQLELNGSRRLCQEEKELLAQELFVRDKMTKSEVLKLLFDNPQELDLNFKTIDGNKTGYALFQAYSKMIEMSGHEPVDFKKPVEKVVEYIKAVFDLLNWNTDILGFNSNEELDNQSYYKLWHLLYSFEGDNTPTGNGRLIQKMTELYGFEKEYATILANVSFQDDYGSLSAKAIHKILPHLKEGNRYDVACVYAGYRHSESSLTREEIANKVLKDRLMLLPKNSLHNPVVEKILNQMVNVINVIIDIYGKPDEIRVELARELKKNAKEREELTKSIAQTTKANEEYKTLLQTEFGLTNVSRTDILRYKLYKELESCGYKTLYSNTYISREKLFSKEFDIEHIIPQARLFDDSFSNKTLEARSVNIEKGNKTAYDFVKEKFGESGADNSLEHYLNNIEDLFKSGKISKTKYNKLKMAEQDIPDGFIERDLRNTQYIAKKALSMLNEISHRVVATSGSVTDKLREDWQLIDVMKELNWEKYKALGLVEYFEDRDGRQIGRIKDWTKRNDHRHHAMDALTVAFTKDVFIQYFNNKNASLDPNANEHAIKNKYFQNGRAIAPMPLREFRAEAKKHLENTLISIKAKNKVITGNINKTRKKGGVNKNMQQTPRGQLHLETIYGSGKQYLTKEEKVNASFDMRKIETVSKSAYRDALLKRLYENDNDPKKAFAGKNSLDKQPIWLDKEQMRKVPEKVKIVTLEAIYTIRKEISPDLKVDKVIDVGVRKILIDRLNEYGNDAKKAFSNLDKNPIWLNKEKGISIKRVTISGISNAQSLHVKKDKDGKPILDENGRNIPVDFVNTGNNHHVAVYYRPVIDKRGQLVVDEAGNPKYELEEVVVSFFEAVTRANLGLPIIDKDYKTTEGWQFLFSMKQNEYFVFPNEKIGFNPKEIDLLDVENYGLISPNLFRVQKFSLKNYVFRHHLETTIKDTSSILRGITWIDFRSSKGLDTIVKVRVNHIGQIVSVGEY

SEQ ID NO: 285 - protein, 1424 aa, Bacteroides sp.
MKRILGLDLGTNSIGWALVNEAETDEEVSSIIRLGVRVNPLTVDETQNFEKGKSITTNAERTLKRSMRRNLQRYKLRRDALVEFLKELGFITDETILSEQGNRTTFETCRLRAKAAEEEISLEELSRVLLMINKKRGYKSSRKVKKEEDGVLIDGMEIAKKLYEEDLTPGQLCSQLLESGKKVLPDFYHSDLQEELDRIWSVQKQFHPDVFCDAAKEEIKGKNRSQTWAILANYFVWKEEVVGWNDREAKNETIEKECKLVGLKRTTKGYELKKENYRWRAQALTEQLGLEEIAVVLQEINGQINASSGYLGAISDRSKVLYFNHQTVGQYQMAELDKNPHASLRNMVFYRQDYLDEFDRIWEKQAEFHKELTAELKKEIRDMIIFYQRRLKSQKGLISFCEFERLEIVVEKDGKKQTKVIGCKVIPRSHPLFQEFKVWQTLNDIKVLGREKKRNALSASESRALYPEEKEILARELAIKENMKKADVLKLLFENPQELDLNFKQIDGNRTGFSLFSAYSKMIEKYGYEPLDFKKPADEIIGQLRTIFTDLGWNTNLFTIDLTKEGKELEMQPYFRLWHLLYSFEGDNTSTGNGKLIEKIMQLCGVEKEYAVELASLSFQDDYGSLSAKAIKRILPYLKEGNLYDVACEYAGYRHSKSSLTKEEIENKVLKGKLEVLPKNSLRNPVVEKILSQMVNVINTIIDTYGKPDEIRVELARELKKSAKEREELTKAIAKSTREHEEIRKLLQDEFGMMNVSRNDIIRYKLYEELKDNGYKTLYSNQYIPKEKIFSKEIDIEHIIPQSRLFDDSLSNKTLEYKAINIEKGNKTAYDFVKEKYGEEGLQQYINRCESLFNDKKAKLRKLKMEQKDIPDGFIDRDLRNTQYIAKKALAMLNEICRRVVATTGSITDQLREDWQLVDVMKELNLPKYEALGFVETYEDKDGRKIKRIKDWTKRNDHRHHAMDALTVAFTKDAFIQYFNNKNAAQDSGNRNHTNIIGIKTRYFDKGRALPPIPLEQFRIEAKQHLEKLLVSIKAKNKVVTVNVNRTKKRKGENTKIQQTPRGQLHLETVYGSHKQYVTKIEKVNASFDAAKIATVSKRAYRNALLKRLETFGNDPKKAFTGKNALEKNPLYADKYQTIRVPEKVQTVEFETIYTIRKPVDPALNVDKVVDVKVRAILERRLKEYGGDPKKAFVNFWENPIWLNKEKGISIKRVSIRGINNAQSIHVKKDKNGNPIWDENGKQIPVDFVNTGNNHHVAIYRKPVLDKKGQVTFDEDGNLMYELDEVVVPFFEAVTRANLGLPIIDKDYRKSEGWQFLFSMKQNEYFVFPNEKTGFNPKEVDLLNPDNYAMISPNLFRVQTMSKVMYGNNVVRDYKFRHHLETTVKDMKELKDIAYKQYKTLSFGNSVVKIRINHIGQIVSVGEY

SEQ ID NO: 286 - protein, 1055 aa, Bacteroides sp.
MRIYRKDLAQDVDVTNELLKTEEDYVALFDWLNGKKEIDQKAFLKYPLFGLKKEVENYRWNYVQDKPYPCNETRSSMLARLEKCDISIEFLTKENEEALWHILYSVEDKNEIVKALQKFADKHDLNASFVDVFQKFPPFKKEYGSYSAKAIKKLLPLMRMGKYWSENSIDKGTRERMDKIITGEYDEKIENRVREKAIHLADVSDFKGLPLWLVCYIVYGRHSEAKEITQWKSPADIDLYLRSFKQHSLRNPIVEQIIIETLRVVRDIWKQVGNIDEIHVELGREMKNPADKRKKMTQQMSENENTNLRIKYLLTEFLNPEYEVENVRPYSPSQQDILRIYEEGVLNSVSDLPEEISDILKKFTETDLKKRPSRSEVLRYKLWLEQKYRSPYTGEVIPLGKLFTPAYEIEHVIPQSCYFDDSFSNKVICEAEVNKLKSNLLGHEFIVKHHGEIVELPFGKKVRIFTVDEYEQFVKDNYSRTRSKMKKLLMDDIPEEFVARQLNDSRYISKVVKSLLSNIVREKGEEEAISKNVIPCTGGVTDRLKKDWGINEVWNKIILPRFQRLNELTGTNKFTTKNVGIQEIPTMPLELQKGFNKKRIDHRHHAMDAIIIACANRNIINYLNNESATAKAELSRYDLQKMLCDKAKTDNNGNYKWVIRKPWASFTQDTYLALENIIVSFKQNLRVINKATNHFLHYNEEGKKIFVKQGKGDNWAIRKSMHKDTVFGEVNLRRIKTVALNEAMKNPQSIVVKDFKRKLLELWNLGFDAKRIKKYFEDNRETWSDINLSKIEVYYFSKDTKDRFFATRKPLDTSFDRKKIENNITDTGIQKILLRHLELKDNNPDIAFSPDGIDEMNRNIIQLNNGKYHQPIIKVRWYEQADKFAVGQTGNKSSKFVEAAKGTNLFFAVYESNILDKKTNTIIKKRNYATIPLNVAIERQKQGLPVAPEDENGNDPIFVLSPNDLVYLPTAADLANGIIAQPLDRGRIYKMVSCTGNEGYFIPARIANPILQTIELGSNNKAQKAWTDEMIKEICMPIKVDRLGNVLESSSSYKK

SEQ ID NO: 287 - protein, 1055 aa, Bacteroides sp.
MRIYRKDLAQDVDVTNELLKTEEDYVALFDWLNGKKEIDQKAFLKYPVFGLKKEIENYRWNYVQDKPYPCNETRSLMLARLEKCDISIEFLTKENEEALWHILYSVEDKNEIVKALQKFADKHDLNASFVDVFQKFPPFKKEYGSYSAKAIKKLLPLMRMGKYWSENSIDKGTRERIDKIITGEYDEKIENRVREKAIHLADVSDFKGLPLWLVCYIVYGRHSEAKEIIQWKSPADIDSYLRSFKQHSLRNPIVEQIIIETLRVVRDIWKQVGNIDEIHVELGREMKNPADKRKKMTQQMSENENTNLRIKYLLTEFLNPEYEVENVRPYSPSQQDILRIYEEGVLNSVSDLPEEISDILKKFTETDLKKRPSRSEVLRYKLWLEQKYRSPYTGEVIPLGKLFTPAYEIEHVIPQSCYFDDSFSNKVICEAEVNKLKSNLLGHEFIVKHHGEIVELPFGKKVRIFTVDEYEQFVKDNYSRTRSKMKKLLMDDIPEEFVTRQLNDSRYISKVVKSLLSNIVREKGEEEAISKNVIPCTGGVTDRLKKDWGINEVWNKIILPRFQRLNELTGTNKFTTKNVGIQEIPTMPLELQKGFNKKRIDHRHHAMDAIIIACANRNIINYLNNESATAKAELSRYDLQKMLCDKAKTDNNGNYKWVIRKPWASFTQDTYLALENIIVSFKQNLRVINKATNRFLHYNEEGKKIFVKQGKGDNWAIRKSMHKDTVFGEVNLRRIKTVALNEAMKNPQSIVVKDFKRKLLELWNLGFDAKRIKKYFEDNRETWSDINLSKIEVYYFSKDTKDRFFATRKPLDTSFDRKKIENNITDTGIQKILLRHLELKDNNPDIAFSPDGIDEMNRNIIQLNNGKYHQPIIKIRWYEQADKFAVGQTGNKSSKFVEAAKGTNLFFAVYESNILDKKTNTIIKKRNYATIPLNVAIERQKQGLPVAPEDENGNDPIFVLSPNDLVYLPTDDELANGIIAQPLDRGRIYKMVSSSGEQCFFIKHIVANVLVDKFEFSPLNKMERALTGEMIKMICIPIKVDRLGNVLESSSSYKK

SEQ ID NO: 288 - protein, 286 aa, Bacteroides uniformis
MLSYKYDKKKIEKYFKENAFLWKELDIAKVAVYYFTENTTEPLVAVRKSLDSTFNEKKIASVTDTGIQKILLNHLKSKEGKAELAFSAEGIEEMNRNLLQLNDGKGHQPIYKVRVYEPRGNKFKVGVLGNKGAKWVEAAKGTNLFFAIYITEDGNRTYETIPLNWVIEREKQGLVPVPDRNEKGDKLLFWLSPNDLVYLPTEEERDFGRINEPIDRGRIYKMVSSSGNQCFFIPQSISNAIISTKELGSNNKAEKSWDGEMIKNICIPVKVDRLGRIIEVKYRVNE

SEQ ID NO: 289 - protein, 1508 aa, Bacteroides uniformis
MRTILGLDLGTNSIGWAVINSVIKEQTERIWIEMAGSRIIPMDAAILGDFDKGNSISQTAERTRFRGVRRLRERQLLRRERLHKVLKILGFLPEHYLKGIDFEKHTGKFLSGSEPKLPWVKDRWGKYSFLFQTAFNEMLADFAKHQPSLVFDGKKIPYDWTVYYLRKKALTEMISKEELAWILLNFNQKRGYYQLRGEEEEDNAGKSVEFYALKVLSVEATDEKKGRDIWYNVHLENGWVYRRSSNVPLDWEGRVKEFIVTTDLNPDGTPKLDKYGEVKRSFRAPKEDDWMLIKKRTEADITGTHKTIGSYIYDALLQEPQQKIIGKLVKTVERKFYKEELNFILQKQCAFHAELQDRDLYMRCIEALYPGNEVQRRNIANRDFIYLLIDDVLFYQRPLKTKKSLIANCPYEENEYVNRKTGEIKTAPLKCIAKSHPLFQEFRLWYFLSNIRVYQKEREVNGTLHLDVDVTTEFLKTEDDYVALFDWLNSRKEIDQKAFLRYPAFGLKKEINNYRWNYVEDKFYPCNETRHAILSRLEKAGIGIDFLSDEKETALWHILYSVSDKQEIEKALATFAVKNGLNESFVEVFKKFPPFKSEYGAYSAKAIKKLLPLMRCGKYWDMSLIDGTTKERIERIIAGECDESIGAKVREKAMNLSDISCFKRLPLWLACYVVYNRHSEDKEITKWETPADIDAYLAAFKQHSLRNPIVEQVITETLRVVRDIWKQVGKIDEIRIELGREMKNPADKRKRMTTQILENENANLRIKALLAEFVNPEYGVENVRPYSPSQQEILRIYEDAVLKGEEQIPEDIDVILKKFNTSKLPTKSEFLRYKLWLEQKYRSPYTGELIPLAKLFTAAYEIEHVIPQSRYFDDSFSNKVICESAVNKLKDNQLGYEFIKNHHGQKVEVGFGKTVEIFSVDSYERFVKEQYAKSGIKMKKLLMDDIPEQFIERQLNDSRYISKVVKGLLSNIVREKNDSGEYEPEAVSKNILVCTGSVTDRLKKDWGMNDVWNSIVSPRFERLNALTETQCFGHWENKDGKKVFQTAVPLEYQKGFSKKRIDHRHHAMDAIVIACATRNHVNYLNNESASRNAKISRYDLQRLLCDKSRGDGNGNYRWIIKKPWTTFTQDAREALSGIIVSLKQNLRIINKTTNIYQHFDANGTRVYEKQKIGDSWAIRKPMHKDTVFGAVNLRKVKVVRLSVALDTPSMIVNKRVKNKVLELLSYKYDKKKIEKYFKENAFLWKELDIAKVAVYYFTENTTEPLVAVRKSLDSTFNEKKIASVTDTGIQKILLNHLKSKEGKAELAFSAEGIEEMNRNLLQLNDGKGHQPIYKVRVYEPRGNKFKVGVLGNKGAKWVEAAKGTNLFFAIYITEDGNRTYETIPLNWVIEREKQGLVPVPDRNEKGDKLLFWLSPNDLVYLPTEEERDFGRINEPIDRGRIYKMVSSSGNQCFFIPQSISNAIISTKELGSNNKAEKSWDGEMIKNICIPVKVDRLGRIIEVKYRVNE

SEQ ID NO: 290 - protein, 1210 aa, Bacteroides uniformis
MRTILGLDLGTNSIGWAVINSVIKEQTERIWIEMAGSRIIPMDAAILGDFDKGNSISQTAERTRFRGVRRLRERQLLRRERLHKVLKILGFLPEHYLKGIDFEKHTGKFLSGSEPKLPWVKDRWGKYSFLFQTAFNEMLADFAKHQPSLVFDGKKIPYDWTVYYLRKKALTEMISKEELAWILLNFNQKRGYYQLRGEEEEDNAGKSVEFYALKVLSVEATDEKKGRDIWYNVHLENGWVYRRSSNVPLDWEGRVKEFIVTTDLNPDGTPKLDKYGEVKRSFRAPKEDDWMLIKKRTEADITGTHKTIGSYIYDALLQEPQQKIIGKLVKTVERKFYKEELNFILQKQCAFHAELQDRDLYMRCIEALYPGNEVQRRNIANRDFIYLLIDDVLFYQRPLKTKKSLIANCPYEENEYVNRKTGEIKTAPLKCIAKSHPLFQEFRLWYFLSNIRVYQKEREVNGTLHLDVDVTTEFLKTEDDYVALFDWLNSRKEIDQKAFLRYPAFGLKKEINNYRWNYVEDKFYPCNETRHAILSRLEKAGIGIDFLSDEKETALWHILYSVSDKQEIEKALATFAVKNGLNESFVEVFKKFPPFKSEYGAYSAKAIKKLLPLMRCGKYWDMSLIDGTTKERIERIIAGECDESIGAKVREKAMNLSDISCFKRLPLWLACYVVYNRHSEDKEITKWETPADIDAYLAAFKQHSLRNPIVEQVITETLRVVRDIWKQVGKIDEIRIELGREMKNPADKRKRMTTQILENENANLRIKALLAEFVNPEYGVENVRPYSPSQQEILRIYEDAVLKGEEQIPEDIDVILKKFNTSKLPTKSEFLRYKLWLEQKYRSPYTGELIPLAKLFTAAYEIEHVIPQSRYFDDSFSNKVICESAVNKLKDNQLGYEFIKNHHGQKVEVGFGKTVEIFSVDSYERFVKEQYAKSGIKMKKLLMDDIPEQFIERQLNDSRYISKVVKGLLSNIVREKNDSGEYEPEAVSKNILVCTGSVTDRLKKDWGMNDVWNSIVSPRFERLNALTETQCFGHWENKDGKKVFQTAVPLEYQKGFSKKRIDHRHHAMDAIVIACATRNHVNYLNNESASRNAKISRYDLQRLLCDKSRGDGNGNYRWIIKKPWTTFTQDAREALSGIIVSLKQNLRIINKTTNIYQHFDANGTRVYEKQKIGDSWAIRKPMHKDTVFGAVNLRKALIPQHYNLTLFISS

SEQ ID NO: 291 - protein, 1504 aa, Bacteroides vulgatus
MKNIVGLDLGTNSIGWAVVNGSVNDDGSEQLVKIQASGSRIIPMDAAMIGDFNKGNSISQTAERTRLRGVRRLSERYLLRRERLHRILDILGFLPFHFAQDLDRHGKIVKGKEPKLAWRKNEAGQFEFIFQDSFKEMLEDFKLNHPNLITDDKKVPYDWTIYYLRKKGLTSKISKEELAWILLNFNQKRGYYQLRGEEEEENKNKLVEFYALKVVAVEDSGEKKGKDIWYNVHLENGWVYRRTSNMPLDWVGKTKEFIVTTDLEKDGTPKKDKEGNVKRSFRAPKEDDWSLLKKKTEADIDQTHKTVGVYIYDTLLGNPSQKIRGRLVRTIERKYYKEELKQILEKQKEFHLELQDRALYAACIEELYPINEAHRNNVGNRDFTYLFLEDILFYQRPLKSKKSLIDNCPYEENQGLDKETGEIKSFPVKCIAKSHPLFQEFRLWQFIVNLRIYRKDLAQDVDVTNELLKTEEDYVALFDWLNGKKEIDQKAFLKYPVFGLKKEIENYRWNYVQDKPYPCNETRSLMLARLEKCDISIEFLTKENEEALWHILYSVEDKNEIVKALQKFADKHDLNASFVDVFQKFPPFKKEYGSYSAKAIKKLLPLMRMGKYWSENSIDKGTRERIDKIITGEYDEKIENRVREKAIHLADVSDFKGLPLWLVCYIVYGRHSEAKEITQWKSPADIDSYLRSFKQHSLRNPIVEQIIIETLRVVRDIWKQVGNIDEIHVELGREMKNPADKRKKMTQQMSENENTNLRIKYLLTEFLNPEYEVENVRPYSPSQQDILRIYEEGVLNSVSDLPEEISDILKKFTETDLKKRPSRSEILRYKLWLEQKYRSPYTGEVIPLGKLFTPAYEIEHVIPQSCYFDDSFSNKVICEAEVNKLKSNLLGHEFIVKHHGEIVELPFGKKVRIFTVDEYEQFVKDNYSRTRSKMKKLLMDDIPEEFVTRQLNDSRYISKVVKSLLSNIVREKGEEEAISKNVIPCTGGVTDRLKKDWGINEVWNKIILPRFQRLNELTGTNKFTTKNVGIQEIPTMPLELQKGFNKKRIDHRHHAMDAIIIACANRNIINYLNNESATAKAELSRYDLQKMLCDKAKTDNNGNYKWVIRKPWASFTQDTYLALENIIVSFKQNLRVINKATNRFLHYNEEGKKIFVKQGKGDNWAIRKSMHKDTVFGEVNLRRIKTVALNEAMKNPQSIVVKDFKRKLLELWNLGFDAKRIKKYFEDNRETWSDINLSKIEVYYFSKDTKDRFFATRKPLDTSFDRKKIENNITDTGIQKILLRHLELKDNNPDIAFSPDGIDEMNRNIIQLNNGKYHQPIIKIRWYEQADKFAVGQTGNKFSKFVEAAKGTNLFFAVYESNILDKKTNTIIKKRNYATIPLNVAIERQKQGLPVAPEDENGNDPIFVLSPNDLVYLPTDDELANGIIAQPLDRGRIYKMVSCTGNEGHFIPARIANPILQTIELGSNNKAQKAWTDEMIKEICMPIKVDRLGNVLESSSSYKK

SEQ ID NO: 292 - protein, 1153 aa, Barnesiella intestinihominis
MKNILGLDLGLSSIGWSVIRENSEEQELVAMGSRVVSLTAAELSSFTQGNGVSINSQRTQKRTQRKGYDRYQLRRTLLRNKLDTLGMLPDDSLSYLPKLQLWGLRAKAVTQRIELNELGRVLLHLNQKRGYKSIKSDFSGDKKITDYVKTVKTRYDELKEMRLTIGELFFRRLTENAFFRCKEQVYPRQAYVEEFDCIMNCQRKFYPDILTDETIRCIRDEIIYYQRPLKSCKYLVSRCEFEKRFYLNAAGKKTEAGPKVSPRTSPLFQVCRLWESINNIVVKDRRNEIVFISAEQRAALFDFLNTHEKLKGSDLLKLLGLSKTYGYRLGEQFKTGIQGNKTRVEIERALGNYPDKKRLLQFNLQEESSSMVNTETGEIIPMISLSFEQEPLYRLWHVLYSIDDREQLQSVLRQKFGIDDDEVLERLSAIDLVKAGFGNKSSKAIRRILPFLQLGMNYAEACEAAGYNHSNNYTKAENEARALLDRLPAIKKNELRQPVVEKILNQMVNVVNALMEKYGRFDEIRVELARELKQSKEERSNTYKSINKNQRENEQIAKRIVEYGVPTRSRIQKYKMWEESKHCCIYCGQPVDVGDFLRGFDVEVEHIIPKSLYFDDSFANKVCSCRSCNKEKNNRTAYDYMKSKGEKALSDYVERVNTMYTNNQISKTKWQNLLTPVDKISIDFIDRQLRESQYIARKAKEILTSICYNVTATSGSVTSFLRHVWGWDTVLHDLNFDRYKKVGLTEVIEVNHRGSVIRREQIKDWSKRFDHRHHAIDALTIACTKQAYIQRLNNLRAEEGPDFNKMSLERYIQSQPHFSVAQVREAVDRILVSFRAGKRAVTPGKRYIRKNRKRISVQSVLIPRGALSEESVYGVIHVWEKDEQGHVIQKQRAVMKYPITSINREMLDKEKVVDKRIHRILSGRLAQYNDNPKEAFAKPVYIDKECRIPIRTVRCFAKPAINTLVPLKKDDKGNPVAWVNPGNNHHVAIYRDEDGKYKERTVTFWEAVDRCRVGIPAIVTQPDTIWDNILQRNDISENVLESLPDVKWQFVLSLQQNEMFILGMNEEDYRYAMDQQDYALLNKYLYRVQKLSKSDYSFRYHTETSVEDKYDGKPNLKLSMQMGKLKRVSIKSLLGLNPHKVHISVLGEIKEIS

SEQ ID NO: 293 - protein, 1352 aa, Belliella baltica
MKKILGLDLGTTSIGWAFIKEPEKDVVGSEIVDMGVRIVPLSSDEENDFAKGNTISINADRTLKRGARRNLQRFKQRRNALLEIFKEKKLISTNFKYAEDGPSSTFSTLNLRAKAAKEKIELQDLVKVLLQINKKRGYKSSRKAKSEEDDGSAIDSMGIAKELYENDLTPGQWVYEALQKGRKNVPDFYRSDLQEEFKKIVNYQSEFFPDIFNASFVEDWMGKASTPTKQYFNKKGVQLAENKGKREERRLQEYKWRAEAVNFKIDLSEIALILSQINSQISNSSGYLGAISDRSKELYFKNLTVGQYLYQQIKKNPHTRLKGQVFYRQDYLDEFERIWSVQSSFYPQLNDALKREVRDITIFFQRRLKSQKHLISNCEFEDHHKVVPKSHPVFQEFRIWQNLNNLLLIKKDNLNEKFDLELESKIALANELAFKRELNVKDALKILGLKPNEWEFNFTKIEGNRTNQAFFDAFAKIIELEDGEPIDLGDLKADDILDQFSEAFLRIGIDTELLQVNSDIEGAEYEKQSYIQFWHLLYSSEDDQKLKLNLIRKFGFKPEHAKILASISLQDDHASLSSRAIKKILPHLQSGLIYDKACTYAGYNHSSSFTKDENEKRELRAELELLKKNSLRNPVVEKILNQMINVVNAILKDPELGRPDEIRVEMARELKANAEQRKNMTSNIASATRDHDKYREILKSEFGLKRVTKNDLLRYKLWLETDGISLYTGKPIEASKLFSKEYDIEHIIPKARLFDDSFSNKTICERQLNIDKANVTAFSFLQNKLSADEFEQYQSRVKSLYGKLSKAKIQKLLMANDKIPEDFIARQLQETRYISKKAKEILFEISRRVSVTTGTITDKLREDWGLVEIMKELNWEKYDKLGLTYTIEGKHGERLNKIKDWSKRNDHRHHAMDALTVALTKPAYIQYLNNLNAKGLNNKKGTEVFAIEQKYLKRENGKLCFIPPIENIRSEAKKHLSRILVSYKAKNKVVTINKNKTKSKAGLNEQIALTPRGQLHKETVYGKSFHYSTKFEKIGASFNVQKINTVAKKEEREALLKRLAENGNDPKKAFTGKNTLNKMPIYLDLGKNIKLSEKVKTVVLEQNYTIRKNIDPDLKVDKVIDVGIKRILESRLEEFGGNAKLAFSNLEENPIWLNKEKGISIKRVKISGVSNVESLHVKKDHFGEPILDQEGNEIPVDFVSTGNNHHVAIYEDENGNLQEEVVSFFEAVVRQNQGLPIIKKNHTLGWKFLFTLKQNEYFVFPSDDFVPADVDLMDEQNYHLISPNLFRVQKIARKNYVFNNHLETKAVDNDLLKSKKELSKITYHFYQTPEHLRGIIKIRINHLGKIIQIGEY

SEQ ID NO: 294 - protein, 1415 aa, Bergeyella zoohelcum
MKHILGLDLGTNSIGWALIERNIEEKYGKIIGMGSRIVPMGAELSKFEQGQAQTKNADRRTNRGARRLNKRYKQRRNKLIYILQKLDMLPSQIKLKEDFSDPNKIDKITILPISKKQEQLTAFDLVSLRVKALTEKVGLEDLGKIIYKYNQLRGYAGGSLEPEKEDIFDEEQSKDKKNKSFIAFSKIVFLGEPQEEIFKNKKLNRRAIIVETEEGNFEGSTFLENIKVGDSLELLINISASKSGDTITIKLPNKTNWRKKMENIENQLKEKSKEMGREFYISEFLLELLKENRWAKIRNNTILRARYESEFEAIWNEQVKHYPFLENLDKKTLIEIVSFIFPGEKESQKKYRELGLEKGLKYIIKNQVVFYQRELKDQSHLISDCRYEPNEKAIAKSHPVFQEYKVWEQINKLIVNTKIEAGTNRKGEKKYKYIDRPIPTALKEWIFEELQNKKEITFSAIFKKLKAEFDLREGIDFLNGMSPKDKLKGNETKLQLQKSLGELWDVLGLDSINRQIELWNILYNEKGNEYDLTSDRTSKVLEFINKYGNNIVDDNAEETAIRISKIKFARAYSSLSLKAVERILPLVRAGKYFNNDFSQQLQSKILKLLNENVEDPFAKAAQTYLDNNQSVLSEGGVGNSIATILVYDKHTAKEYSHDELYKSYKEINLLKQGDLRNPLVEQIINEALVLIRDIWKNYGIKPNEIRVELARDLKNSAKERATIHKRNKDNQTINNKIKETLVKNKKELSLANIEKVKLWEAQRHLSPYTGQPIPLSDLFDKEKYDVDHIIPISRYFDDSFTNKVISEKSVNQEKANRTAMEYFEVGSLKYSIFTKEQFIAHVNEYFSGVKRKNLLATSIPEDPVQRQIKDTQYIAIRVKEELNKIVGNENVKTTTGSITDYLRNHWGLTDKFKLLLKERYEALLESEKFLEAEYDNYKKDFDSRKKEYEEKEVLFEEQELTREEFIKEYKENYIRYKKNKLIIKGWSKRIDHRHHAIDALIVACTEPAHIKRLNDLNKVLQDWLVEHKSEFMPNFEGSNSELLEEILSLPENERTEIFTQIEKFRAIEMPWKGFPEQVEQKLKEIIISHKPKDKLLLQYNKAGDRQIKLRGQLHEGTLYGISQGKEAYRIPLTKFGGSKFATEKNIQKIVSPFLSGFIANHLKEYNNKKEEAFSAEGIMDLNNKLAQYRNEKGELKPHTPISTVKIYYKDPSKNKKKKDEEDLSLQKLDREKAFNEKLYVKTGDNYLFAVLEGEIKTKKTSQIKRLYDIISFFDATNFLKEEFRNAPDKKTFDKDLLFRQYFEERNKAKLLFTLKQGDFVYLPNENEEVILDKESPLYNQYWGDLKERGKNIYVVQKFSKKQIYFIKHTIADIIKKDVEFGSQNCYETVEGRSIKENCFKLEIDRLGNIVKVIKR

SEQ ID NO: 295 - protein, 1430 aa, Bergeyella zoohelcum
MKHILGLDLGTNSIGWAVVKEAQNDNEQSEIVDVGVRVNPLTTDEKTNFEKGKPISTNADRTLKRSARRNLQRYKLRRKELIELLKEHQLISTDTILTENGKGTTFQTLELRAKSAKEKISLEELARVFLTINKKRGYKSSRKAKNEDEGQLIDGMEIAKRLYEENLTTGQLSLQLLKEGKKSLPDYYRSDLQFELDKVWNFQKQFHSDILTDEFYAQLKGKGQRATSALFLAKYQIYTAENKGSREDKKLQAYQWRVDALSKELTREQLAFVITEINNNLNNSSGYLGAISDRSKELYFNNETVGEYLWKQIAANPHTSLKNQVFYRQDYLDEFEQIWKTQSAFYPEILTDELKKELRDVVIFYQRKLKSQKSLVSFCEFENKEIEIKKEDGTSTKKVIGLKVAPKSSPLFQEFKIWQNLNNVLIRKKGSKTKKVAKNQQAVLFEEEKTISELDLEAKQALFNELNLKGNLKADYCLEILGYSPKEWEMNYSVLEGNRTNKALYEAYLKITDLEGYDAKNHLKVKLNKDEVELDDLKVPASEIKDMVQAIFKEAGINTDILHFNAELDGKDFENQASYQLWHLLYSYEGDDSKSGNELLYKLLETKFGFKKEYAQILANVSLSDDYGSLSTKAMRKIHPYIKENKFSTACELAGYRHSKHSLTKEENDNRVLKDSLEVLKKNSLRQPVVEKILNQMINLVNALLKKYRTENPNFKFDEIRIELARELKKNAEERANMTANINKAKTEHEKIIKILKNEFGLPNPTRNDIIRYRLYEELKANGYKDLYTNIKIPQEKLFTKEIDIEHIIPKSRVFDDSFSNKTLSFRKTNLDKGERTAFDYMESKFGADKLEEYVARVEDLYKNNIISKAKYQKLLKKESEIGDGFVERDLRETQYIAKKAKEILLQITPNVLSTSGGITDRLREDWDLINVMKELNLPKYRALGLTQMEDRKYGQQVEVITDWTKRNDHRHHAMDALTVAFTKHNHIQYLNYLNARKNEKHKEHSNIMGIQQLETIKVTDKNGNEKRVFKAPMPNFRQVTKAFLENILISHKAKNKVVTKNKNKVAGSNKVQEVLTPRGQLHKETVYGKYQYYVQKEEKIGAKFDLETIKKVANPLYQSLLKKRLEENGGDPKKAFTGKNSLAKNPIYLDDTQTEQLPEKVKLVWLENSFSIRKDITPENFKDEKLIDKILDEGVKRILKERLQSFGNDAKKAFSDLDKNPIWLNKEKGITIKRVTISGVANAEPLHTKKDHLGKEILDKEGKPIPVDFISTGSNHHVAVYRDEKGNLQEKVVSVFEAVVRANQGLPIIDKTYNQHLGWEFLFTMKQNEMFVFPNESTGFNPNDIDLLDPKNKRIISPNLFRVQKFSKLQYGNSFVREFVFRHHLETTVEDRKELQGITYKQMKNSTFFNDIIKVRINHLGDIVSIGEY

SEQ ID NO: 296 - protein, 1281 aa, Bifidobacterium bifidum
MEDDSQHDIREIYLAIHHMVKYRGNFLVEGTLESSNAFKEDELLKLLGRITRYEMSEGEQNSDIEQDDENKLVAPANGQLADALCATRGSRSMRVDNALEALSAVNDLSREQRAIVKAIFAGLEGNKLDLAKIFVSKEFSSENKKILGIYFNKSDYEEKCVQIVDSGLLDDEEREFLDRMQGQYNAIALKQLLGRSTSVSDSKCASYDAHRANWNLIKLQLRTKENEKDINENYGILVGWKIDSGQRKSVRGESAYENMRKKANVFFKKMIETSDLSETDKNRLIHDIEEDKLFPIQRDSDNGVIPHQLHQNELKQIIKKQGKYYPFLLDAFEKDGKQINKIEGLLAFRVPYFVGPLVVPEDLQKSDNSENHWMVRKKKGEITPWNFDEMVDKDASGRKFIERLVGTDSYLLGEPTLPKNSLLYQEYEVLNELNNVRLSVRTGNHWNDKRRMRLGREEKTLLCQRLFMKGQTVTKRTAENLLRKEYGRTYELSGLSDESKFTSSLSTYGKMCRIFGEKYVNEHRDLMEKIVELQTVFEDKETLLHQLRQLEGISEADCALLVNTHYTGWGRLSRKLLTTKAGECKISDDFAPRKHSIIEIMRAEDRNLMEIITDKQLGFSDWIEQENLGAENGSSLMEVVDDLRVSPKVKRGIIQSIRLIDDISKAVGKRPSRIFLELADDIQPSGRTISRKSRLQDLYRNANLGKEFKGIADELNACSDKDLQDDRLFLYYTQLGKDMYTGEELDLDRLSSAYDIDHIIPQAVTQNDSIDNRVLVARAENARKTDSFTYMPQIADRMRNFWQILLDNGLISRVKFERLTRQNEFSEREKERFVQRSLVETRQIMKNVATLMRQRYGNSAAVIGLNAELTKEMHRYLGFSHKNRDINDYHHAQDALCVGIAGQFAANRGFFADGEVSDGAQNSYNQYLRDYLRGYREKLSAEDRKQGRAFGFIVGSMRSQDEQKRVNPRTGEVVWSEEDKDYLRKVMNYRKMLVTQKVGDDFGALYDETRYAATDPKGIKGIPFDGAKQDTSLYGGFSSAKPAYAVLIESKGKTRLVNVTMQEYSLLGDRPSDDELRKVLAKKKSEYAKANILLRHVPKMQLIRYGGGLMVIKSAGELNNAQQLWLPYEEYCYFDDLSQGKGSLEKDDLKKLLDSILGSVQCLYPWHRFTEEELADLHVAFDKLPEDEKKNVITGIVSALHADAKTANLSIVGMTGSWRRMNNKSGYTFSDEDEFIFQSPSGLFEKRVTVGELKRKAKKEVNSKYRTNEKRLPTLSGASQP

SEQ ID NO: 297 - protein, 1121 aa, Bifidobacterium dentium
MSVGLAAIEVDETGFPIRILNIQSVIHDGGIDPQLGKKKSISRKAISGVARRTRRMRRRKVVRLRQLDATLESLGFPIVEPDSLDTWEIWLTRAKLASSYIQDDETRKEDVSIALRHIARHRGWRNPYSNVESLFVDVAPSEQYEELRRKAEEKLGTSLSGNPTSAEIVECILKRQVGEVQLRTRSRKGVNGNAVEKEGLLPTKLMQSDNAAEIRRIFKVQRIDDETGRKLLRAVFKACSPKGSVERRVGRDALAPGLPRALKASLAFQEYRIANVLTNLVISEDGTKRKLTIAEKQRVFGFLSSNETDDITWIDVAEKLGLERRQIQGVGCLTADGEERISSTPPRNITALHIHSAKPVIREKLVAWWKAASPTVRETMVELLSNTVDIDRVREDMDYSSAVAFIDSLGDEELTALDSVDLLSGRAAYSRQTLKQLTERMLNTDDDLHEARKAVFGVDDNWKPPVDAISTSVGNPAVDRVLKIVNRYLLACQKRWRNPQSVQIEHVRESFSSVAKAKETERVQGERARYRNDLRRELCEQEGLNKIRESDIRRWESVQRQNGTCLYCGSPITFRTCEMDHIVPRKGVGSTNTRVNLAAACAACNKLKSNTAFSVWARTEGAANRKVSQRDAIERVKTFIFNKSVPPREQRAFKQAVISRLRQAESDPAIDNRSIESVAWMADELHRRIEAYFNQDADVSGNTPATQVWVFQGRVTALARKASGIEGRIHFAGEWKKTRLDRRHHAVDAAVIAMMNHSAAQTLVERDSLRLSQWITRKPETWKNYPFSEGQKKTRFKEWLDCMNALLDLLNDALDSDRVPVTRCQRMSLGNSQAHAATIRKMKRVELFSPMDADLIRRASTPALYCALTRLPEYSPEKGLPENRGREIVLNGRHIRSTETVDFFASGAAQLMVRNGSAEIGDSIHHMRIYRYRKTGAKSQEYVYGMIRVFQIDLLHASSENLFAVQLPSQSVSVRYGDKNVVQAIQEGRAEYLGHIVPNDEILISYEGVRMKDSEKIGAYANDFSGTASELAQRRHWVVVGSDVSKLALRPSYLSEEGLENSGSESERLSKQTRKVIEGKGWVVAVNILAKYHPVVIRRNALGEPRFRTNSGMPVSWRWDR

SEQ ID NO: 298 - protein, 354 aa, Bifidobacterium longum
AKQYVNSASIDDAEAETMKTTVSVFQGRVTASARRAAGIEGKIHFIGQQSKTRLDRRHHAVDASVIAMMNTAAAQTLMERESLRESQRLIGLMPGERSWKEYPYEGTSRYESFHLWLDNMDVLLELLNDALDNDRIAVMQSQRYVLGNSIAHDATIHPLEKVPLGSAMSADLIRRASTPALWCALTRLPDYDEKEGLPEDSHREIRVHDTRYSADDEMGFFASQAAQIAVQEGSADIGSAIHHARVYRCWKTNAKGVRKYFYGMIRVFQTDLLRACHDDLFTVPLPPQSISMRYGEPRVVQALQSGNAQYLGSLVVGDEIEMDFSSLDVDGQIGEYLQFFSQFSGGNLAWKHWV

SEQ ID NO: 299 - protein, 1124 aa, Bifidobacterium longum
LTGHSGHTFWPTSSSPPIQLEQEKRPLPQRNTSQNGHTFWPITRERCFMRGKRYRIGIDVGLNSVGLAAVEVSDENSPVRLLNAQSVIHDGGVDPQKNKEAITRKNMSGVARRTRRMRRRKRERLHKLDMLLGKFGYPVIEPESLDKPFEEWHVRAELATRYIEDDELRRESISIALRHMARHRGWRNPYRQVDSLISDNPYSKQYGELKEKAKAYNDDATAAEEESTPAQLVVAMLDAGYAEAPRLRWRTGSKKPDAEGYLPVRLMQEDNANELKQIFRVQRVPADEWKPLFRSVFYAVSPKGSAEQRVGQDPLAPEQARALKASLAFQEYRIANVITNLRIKDASAELRKLTVDEKQSIYDQLVSPSSEDITWSDLCDFLGFKRSQLKGVGSLTEDGEERISSRPPRLTSVQRIYESDNKIRKPLVAWWKSASDNEHEAMIRLLSNTVDIDKVREDVAYASAIEFIDGLDDDALTKLDSVDLPSGRAAYSVETLQKLTRQMLTTDDDLHEARKTLFNVTDSWRPPADPIGEPLGNPSVDRVLKNVNRYLMNCQQRWGNPVSVNIEHVRSSFSSVAFARKDKREYEKNNEKRSIFRSSLSEQLRADEQMEKVRESDLRRLEAIQRQNGQCLYCGRTITFRTCEMDHIVPRKGVGSTNTRTNFAAVCAECNRMKSNTPFAIWARSEDAQTRGVSLAEAKKRVTMFTFNPKSYAPREVKAFKQAVIARLQQTEDDAAIDNRSIESVAWMADELHRRIDWYFNAKQYVNSASIDDAEAETMKTTVSVFQGRVTASARRAAGIEGKIHFIGQQSKTRLDRRHHAVDASVIAMMNTAAAQTLMERESLRESQRLIGLMPGERSWKEYPYEGTSRYESFHLWLDNMDVLLELLNDALDNDRIAVMQSQRYVLGNSIAHDATIHPLEKVPLGSAMSADLIRRASTPALWCALTRLPDYDEKEGLPEDSHREIRVHDTRYSADDEMGFFASQAAQIAVQEGSADIGSAIHHARVYRCWKTNAKGVRKYFYGMIRVFQTDLLRACHDDLFTVPLPPQSISMRYGEPRVVQALQSGNAQYLGSLVVGDEIEMDFPVSMLMVRLASIYNSSRSLVEGTLHGNIGLLMDSLTRRS

SEQ ID NO: 300 - protein, 166 aa, Bifidobacterium longum
MGLAAVEVSDENSPVRLLNAQSVIHDGGVDPQKNKEAITRKNMSGVARRTRRMRRRKRERLHKLDMLLGKFGYPVIEPESLDKPFEEWHVRAELATRYIEDDELRRESISIALRHMARHRGWRNPYRQVDSLISDNPYSKQYGELKEKAKAYNDDATAAEEESTPA

SEQ ID NO: 301 - protein, 1138 aa, Bifidobacterium longum
MNSVGLAAVEVSDENSPVRLLNAQSVIHDGGVDPQKNKEAITRKNMSGVARRTRRMRRRKRERLHKLDMLLGKFGYPVIEPESLDKPFEEWHVRAELATRYIEDDELRRESISIALRHMARHRGWRNPYRQVDSLISDNPYSKQYGELKEKAKAYNDDATAAEEESTPAQLVVAMLDAGYAEAPRLRWRTGSKKPDAEGYLPVRLMQEDNANELKQIFRVQRVPADEWKPLFRSVFYAVSPKGSAEQRVGQDPLAPEQARALKASLAFQEYRIANVITNLRIKDASAELRKLTVDEKQSIYDQLVSPSSEDITWSDLCDFLGFKRSQLKGVGSLTEDGEERISSRPPRLTSVQRIYESDNKIRKPLVAWWKSASDNEHEAMIRLLSNTVDIDKVREDVAYASAIEFIDGLDDDALTKLDSVDLPSGRAAYSVETLQKLTRQMLTTDDDLHEARKTLFNVTDSWRPPADPIGEPLGNPSVDRVLKNVNRYLMNCQQRWGNPVSVNIEHVRSSFSSVAFARKDKREYEKNNEKRSIFRSSLSEQLRADEQMEKVRESDLRRLEAIQRQNGQCLYCGRTITFRTCEMDHIVPRKGVGSTNTRTNFAAVCAECNRMKSNTPFAIWARSEDAQTRGVSLAEAKKRVTMFTFNPKSYAPREVKAFKQAVIARLQQTEDDAAIDNRSIESVAWMADELHRRIDWYFNAKQYVNSASIDDAEAETMKTTVSVFQGRVTASARRAAGIEGKIHFIGQQSKTRLDRRHHAVDASVIAMMNTAAAQTLMERESLRESQRLIGLMPGERSWKEYPYEGTSRYESFHLWLDNMDVLLELLNDALDNDRIAVMQSQRYVLGNSIAHDATIHPLEKVPLGSAMSADLIRRASTPALWCALTRLPDYDEKEGLPEDSHREIRVHDTRYSADDEMGFFASQAAQIAVQEGSADIGSAIHHARVYRCWKTNAKGVRKYFYGMIRVFQTDLLRACHDDLFTVPLPPQSISMRYGEPRVVQALQSGNAQYLGSLVVGDEIEMDFSSLDVDGQIGEYLQFFSQFSGGNLAWKHWVVDGFFNQTQLRIRPRYLAAEGLAKAFSDDVVPDGVQKIVTKQGWLPPVNTASKTAVRIVRRNAFGEPRLSSAHHMPCSWQWRHE

SEQ ID NO: 302 - protein, 182 aa, Bifidobacterium longum
MRGKRYRIGIDVGLNSVGLAAVEVSDENSPVRLLNAQSVIHDGGVDPQKNKEAITRKNMSGVARRTRRMRRRKRERLHKLDMLLGKFGYPVIEPESLDKPFEEWHVRAELATRYIEDDELRRESISIALRHMARHRGWRNPYRQVDSLISDNPYSKQYGELKEKAKAYNDDATAAEEESTPA

SEQ ID NO: 303 - protein, 441 aa, Bifidobacterium longum
MVAMLDAGYAEAPRLRWRTGSKKPDAEGYLPVRLMQEDNANELKQIFRVQRVPADEWKPLFRSVFYAVSPKGSAEQRVGQDPLAPEQARALKASLAFQEYRIANVITNLRIKDASAELRKLTVDEKQSIYDQLVSPSSEDITWSDLCDFLGFKRSQLKGVGSLTEDGEERISSRPPRLTSVQRIYESDNKIRKPLVAWWKSASDNEHEAMIRLLSNTVDIDKVREDVAYASAIEFIDGLDDDALTKLDSVDLPSGRAAYSVETLQKLTRQMLTTDDDLHEARKTLFNVTDSWRPPADPIGEPLGNPSVDRVLKNVNRYLMNCQQRWGNPVSVNIEHVRSSFSSVAFARKDKREYEKNNEKRSIFRSSLSEQLRADEQMEKVRESDLRRLEAIQRQNGQCLYCGRTITFRTCEMDHIVPRKGVGSTNTRTNFAAVCAECNRM

SEQ ID NO: 304 - protein, 967 aa, Bifidobacterium longum
MVAMLDAGYAEAPRLRWRTGSKKPDAEGYLPVRLMQEDNANELKQIFRVQRVPADEWKPLFRSVFYAVSPKGSAEQRVGQDPLAPEQARALKASLAFQEYRIANVITNLRIKDASAELRKLTVDEKQSIYDQLVSPSSEDITWSDLCDFLGFKRSQLKGVGSLTEDGEERISSRPPRLTSVQRIYESDNKIRKPLVAWWKSASDNEHEAMIRLLSNTVDIDKVREDVAYASAIEFIDGLDDDALTKLDSVDLPSGRAAYSVETLQKLTRQMLTTDDDLHEARKTLFNVTDSWRPPADPIGEPLGNPSVDRVLKNVNRYLMNCQQRWGNPVSVNIEHVRSSFSSVAFARKDKREYEKNNEKRSIFRSSLSEQLRADEQMEKVRESDLRRLEAIQRQNGQCLYCGRTITFRTCEMDHIVPRKGVGSTNTRTNFAAVCAECNRMKSNTPFAIWARSEDAQTRGVSLAEAKKRVTMFTFNPKSYAPREVKAFKQAVIARLQQTEDDAAIDNRSIESVAWMADELHRRIDWYFNAKQYVNSASIDDAEAETMKTTVSVFQGRVTASARRAAGIEGKIHFIGQQSKTRLDRRHHAVDASVIAMMNTAAAQTLMERESLRESQRLIGLMPGERSWKEYPYEGTSRYESFHLWLDNMDVLLELLNDALDNDRIAVMQSQRYVLGNSIAHDATIHPLEKVPLGSAMSADLIRRASTPALWCALTRLPDYDEKEGLPEDSHREIRVHDTRYSADDEMGFFASQAAQIAVQEGSADIGSAIHHARVYRCWKTNAKGVRKYFYGMIRVFQTDLLRACHDDLFTVPLPPQSISMRYGEPRVVQALQSGNAQYLGSLVVGDEIEMDFSSLDVDGQIGEYLQFFSQFSGGNLAWKHWVVDGFFNQTQLRIRPRYLAAEGLAKAFSDDVVPDGVQKIVTKQGWLPPVNTASKTAVRIVRRNAFGEPRLSSAHHMPCSWQWRHE

SEQ ID NO: 305 - protein, 1151 aa, Bifidobacterium sp.
MRGKRYRIGIDVGLNSVGLAAVEVSDENSPVRLLNAQSVIHDGGVDPQKNKEAITRKNMSGVARRTRRMRRRKRERLHKLDMLLGKFGYPVIEPESLDKPFEEWHVRAELATRYIEDDELRRESISIALRHMARHRGWRNPYRQVDSLISDNPYSKQYGELKEKAKAYNDDATAAEEESTPAQLVVAMLDAGYAEAPRLRWRTGSKKPDAEGYLPVRLMQEDNANELKQIFRVQRVPADEWKPLFRSVFYAVSPKGSAEQRVGQDPLAPEQARALKASLAFQEYRIANVITNLRIKDASAELRKLTVDEKQSIYDQLVSPSSEDITWSDLCDFLGFKRSQLKGVGSLTEDGEERISSRPPRLTSVQRIYESDNKIRKPLVAWWKSASDNEHEAMIRLLSNTVDIDKVREDVAYASAIEFIDGLDDDALTKLDSVDLPSGRAAYSVETLQKLTRQMLTTDDDLHEARKTLFNVTDSWRPPADPIGEPLGNPSVDRVLKNVNRYLMNCQQRWGNPVSVNIEHVRSSFSSVAFARKDKREYEKNNEKRSIFRSSLSEQLRADEQMEKVRESDLRRLEAIQRQNGQCLYCGRTITFRTCEMDHIVPRKGVGSTNTRTNFAAVCAECNRMKSNTPFAIWARSEDAQTRGVSLAEAKKRVTMFTFNPKSYAPREVKAFKQAVIARLQQTEDDAAIDNRSIESVAWMADELHRRIDWYFNAKQYVNSASIDDAEAETMKTTVSVFQGRVTASARRAAGIEGKIHFIGQQSKTRLDRRHHAVDASVIAMMNTAAAQTLMERESLRESQRLIGLMPGERSWKEYPYEGTSRYESFHLWLDNMDVLLELLNDALDNDRIAVMQSQRYVLGNSIAHDATIHPLEKVPLGSAMSADLIRRASTPALWCALTRLPDYDEKEGLPEDSHREIRVHDTRYSADDEMGFFASQAAQIAVQEGSADIGSAIHHARVYRCWKTNAKGVRKYFYGMIRVFQTDLLRACHDDLFTVPLPPQSISMRYGEPRVVQALQSGNAQYLGSLVVGDEIEMDFSSLDVDGQIGEYLQFFSQFSGGNLAWKHWVVDGFFNQTQLRIRPRYLAAEGLAKAFSDDVVPDGVQKIVTKQGWLPPVNTASKTAVRIVRRNAFGEPRLSSAHHMPCSWQWRHE

SEQ ID NO: 306 - protein, 1092 aa, Brevibacillus laterosporus
MAYTMGIDVGIASCGWAIVDLERQRIIDIGVRTFEKAENPKNGEALAVPRREARSSRRRLRRKKHRIERLKYMFVRNGLAVDIQHLEQTLRSQNEIDVWQLRVDGLDRMLTQKEWLRVLIHLAQRRGFQSNRKTDGSSEDGQVLVNVTENDRLMEEKDYRTVAEMMVKDEKFSDHKRNKNGNYHGVVSRASLLVEIHTLFESQRQHHNFLASKDFELEYINIWSSQRPVATKDQIEKMIGTCTFLPKEKRAPKASWHFQYFMLLQTINHIRITNAQGTRPLNKEEIEQVVNMALTKSKVSYHDIRKVLDLSEEYQFVGLDYGKEDEKKKVESKETIIKLDDYHKLNKIFNEVELAKGETWEAVDYDTVAYALTFFKDDEDIRDYLQNKYKDSKNRLVKNVANKEYTNELIEKVSTLSFRKVGHLSLKALRKIIPFLEQGMTYDKACQAAGFNFQGISKKKRSVVLPVIDQISNPVVNRALTQTRKVINALIKKYGSPETIHIETARELSKRFDERKNITKDYKENRDKNERAKKHLSELGIINPTGLDIVKYKLWCEQQGRCMYSNQPISFERLRESGYTEVDHIIPYSRSMNDSYNNRVLVMTRENREKSNQTPYEYMGNDTQRWDEFEQRVTTNPQIKKEKRQNLLLKGFTNRRELEMLERNLNDTRHITKYLSHFISTNLEFSPSDKKKKVVNTSGRITSHLRSRWGLEKNREQNDLHHAMDAVVIAVTSDSFIQQVTNYYKRKERRELNGDDKFPLPWKFFREEVIARLSPNPKEQIEALPNHFYSEDELADLQPIFVSRMPKRSITGEAHQAQFRRVVGKTKEGKNITAKKTALVDISYDKNGDFNMYGRETDPATYEAIKERYLEFGGNAKKAFSTDLHKPKKDGTKGPLIKSVRIMENKTLVHPVNKGKGVVYNSSIVRTDVFQRKEKYYLLPVYVTDVTKGKLPNKVIAAKKGYDDWIEVDDSFTFLYSLYPNDLIFIRQNPKKKISLKKRIESHSISDSKEVQEILTYYKGVDSSTAAIEFITHDGSYYAKGVGVQNLDCFEKYQVDILGNYSKVKGEKRLELETSDNNHKGKDVNSIKSTSR

SEQ ID NO: 307 - protein, 103 aa, Butyrivibrio fibrisolvens
MISVGQSRKDLEDLGYEFKLSFYKEDIIEYEKNGDILVERFLSRTMPQVRNYIETKPIDRPKYDKRNPVGLSKTSSIRKITMDILGNRFYVDKMSFNNVVGTQ

SEQ ID NO: 308 - protein, 177 aa, Butyrivibrio fibrisolvens
MLIAFSQMGYDAYHELTNKYIDFETGEIIDKEGFNELLNNDLVYKNTMYESKWLKIKGNIEKAAEKNKYWYQVNKKCNRGLCNQTVYGTRESDGDVYKISKIDIRTDDGFKKFKNIVDKGNESVFLMYENDPKTFELIMDIYKNYSDSKNPFVQYEKETGDIIRKYSKKITGQRFLN

SEQ ID NO: 309 - protein, 1442 aa, Caenispirillum salinarum
MPVLSPLSPNAAQGRRRWSLALDIGEGSIGWAVAEVDAEGRVLQLTGTGVTLFPSAWSNENGTYVAHGAADRAVRGQQQRHDSRRRRLAGLARLCAPVLERSPEDLKDLTRTPPKADPRAIFFLRADAARRPLDGPELFRVLHHMAAHRGIRLAELQEVDPPPESDADDAAPAATEDEDGTRRAAADERAFRRLMAEHMHRHGTQPTCGEIMAGRLRETPAGAQPVTRARDGLRVGGGVAVPTRALIEQEFDAIRAIQAPRHPDLPWDSLRRLVLDQAPIAVPPATPCLFLEELRRRGETFQGRTITREAIDRGLTVDPLIQALRIRETVGNLRLHERITEPDGRQRYVPRAMPELGLSHGELTAPERDTLVRALMHDPDGLAAKDGRIPYTRLRKLIGYDNSPVCFAQERDTSGGGITVNPTDPLMARWIDGWVDLPLKARSLYVRDVVARGADSAALARLLAEGAHGVPPVAAAAVPAATAAILESDIMQPGRYSVCPWAAEAILDAWANAPTEGFYDVTRGLFGFAPGEIVLEDLRRARGALLAHLPRTMAAARTPNRAAQQRGPLPAYESVIPSQLITSLRRAHKGRAADWSAADPEERNPFLRTWTGNAATDHILNQVRKTANEVITKYGNRRGWDPLPSRITVELAREAKHGVIRRNEIAKENRENEGRRKKESAALDTFCQDNTVSWQAGGLPKERAALRLRLAQRQEFFCPYCAERPKLRATDLFSPAETEIDHVIERRMGGDGPDNLVLAHKDCNNAKGKKTPHEHAGDLLDSPALAALWQGWRKENADRLKGKGHKARTPREDKDFMDRVGWRFEEDARAKAEENQERRGRRMLHDTARATRLARLYLAAAVMPEDPAEIGAPPVETPPSPEDPTGYTAIYRTISRVQPVNGSVTHMLRQRLLQRDKNRDYQTHHAEDACLLLLAGPAVVQAFNTEAAQHGADAPDDRPVDLMPTSDAYHQQRRARALGRVPLATVDAALADIVMPESDRQDPETGRVHWRLTRAGRGLKRRIDDLTRNCVILSRPRRPSETGTPGALHNATHYGRREITVDGRTDTVVTQRMNARDLVALLDNAKIVPAARLDAAAPGDTILKEICTEIADRHDRVVDPEGTHARRWISARLAALVPAHAEAVARDIAELADLDALADADRTPEQEARRSALRQSPYLGRAISAKKADGRARAREQEILTRALLDPHWGPRGLRHLIMREARAPSLVRIRANKTDAFGRPVPDAAVWVKTDGNAVSQLWRLTSVVTDDGRRIPLPKPIEKRIEISNLEYARLNGLDEGAGVTGNNAPPRPLRQDIDRLTPLWRDHGTAPGGYLGTAVGELEDKARSALRGKAMRQTLTDAGITAEAGWRLDSEGAVCDLEVAKGDTVKKDGKTYKVGVITQGIFGMPVDAAGSAPRTPEDCEKFEEQYGIKPWKAKGIPLA

SEQ ID NO: 310 - protein, 984 aa, Campylobacter coli
MARILAFDIGISSIGWAFSENDELKDCGVRIFTKAENPKTGESLALPRRLARSARKCLARRKARLNHLKHLIANEFKLNYEDYQSFDESLAKAYKGSLISPYELRFRALNELLSKQDFARVILHIAKRRGYDDIKNNGDEEKSEILKAIKQNEEKLVNYQSVGEYLYKEYFQKFKENSKEFINVRNKKESYERCIAQSFLKDELKLIFQKQREFGFSFSKKFEEEVLSVAFYKRALKDFSHLVGNCSFFTDEKRAPKNSPLAFMFVALTRIINLLNNLKNTEGILYTKDDLNALLNEVLKNGTLTYKQTKKLLGLSDDYEFKGEKGTYFIEFKKYKEFIKALGEHNLSQDDLNEIAKDITLIKDEIKLKKALAKYDLNQNQIDSLSKLEFKDHLNISFKALKLITPLMLEGKKYDEACNELNLKVAINEDKKDFLPAFNETYYKDEVTNPVVLRAIKEYRKVLNALLKKYGKVHKINIELAREVGKNHSQRAKIEKEQNENYKAKKDAELECEKLGLKINSKNILKLRLFKEQKEFCAYSGEKIKISDLQDEKMLEIDHIYPYSRSFDDSYMNKVLVFTKQNQEKLNQTPFEAFGNDSAKWQKIEVLAKNLPTKKQKRILDKNYKDKEQKNFKDRNLNDTRYIARLVLNYTKDYLDFLPLSDDENTKLNDTQKGSKVHVEAKSGMLTSALRHTWGFSAKDRNNHLHHAIDAVIIAYANNSIVKAFSDFKKEQESNSAELYAKKISELDYKNKRKFFEPFSGFRQKVLDKIDEIFVSKPERKKPSGALHEETFRKEEEFYQSYGGKEGVLKALELGKIRKVNGKIVKNGDMFRVDIFKHKKTNKFYAVPIYTMDFALKVLPNKAVARSKKGEIKDWILMDENYEFCFSLYKDSLILIQTKDMQEPEFVYYNAFTSSTVSLIVSKHDNKFETLSKNQKILFKNANEKEVIAKSIGIQNLKVFEKYIVSALGEVTKAEFRQREDFKK

SEQ ID NO: 311 - protein, 984 aa, Campylobacter coli
MARILAFDIGISSIGWAFSENDELKDCGVRIFTKAENPKTGESLALPRRLARSARKRLARRKARLNHLKHLIANEFKLNYEDYQSFDESLAKAYKGSLISPYELRFRALNELLSKQDFARVILHIAKRRGYDDIKNNGDEEKGKILKAIKQNEEKLVNYQSVGEYLYKEYFQKFKENSKEFINVRNKKESYERCITQSFLKYELKLIFQKQREFGFSFSKKFEEEVLSVAFYKRALKDFSHLVGNCSFFSDEKRAPKNSPLAFMFVALTRIINLLNNLKNTEGILYTKDDLNALLNEVLKNGTLTYKQTKKLLGLSDDYEFKGEKGTYFIEFKKYKEFIKALGEHNLSQDDLNEIAKDITLIKDEIKLKKALAKYDLNQNQIDSLSKLEFKDHLNISFKALKLITPLMLEGKKYDEACNELNLKVAINEDKKDFLPAFNETYYKDEVTNPVVLRAIKEYRKVLNALLKKYGKVHKINIELAREVGKNYSQRAKIEKEQNENYKAKKDAELECEKLGLKINSKNILKLRLFKEQKEFCAYSGEKIKISDLQDEKMLEIDHIYPYSRSFDDSYMNKVLVFTKQNQEKLNQTPFEAFGNDSAKWQKIEVLAKNLPTKKQKRILDKNYKDKEQKNFKDRNLNDTRYIARLVLNYTKDYLDFLPLSDDENTKLNDTQKGSKVHVEAKSGMLTSALRHTWGFSAKDRNNHLHHAIDAVIIAYANNSIVKAFSDFKKEQESNSAELYAKKISELDYKNKRKFFEPFSGFRQKVLDKIDEIFVSKPERKKPSGALHEETFRKEEEFYQSYGGKEGVLKALELGKIRKVNGKIVKNGDMFRVDIFKHKKTNKFYAVPIYTMDFALKVLPNKAVARSKKGEIKDWILMDENYEFCFSLYKDSLILIQTKDMQEPEFVYYNAFTSSTVSLIVSKHDNKFETLSKNQKILFKNANEKEVIAKSIGIQNLKVFEKYIVSALGEVTKAEFRQREDFKK

SEQ ID NO: 312 - protein, 984 aa, Campylobacter coli
MARILAFDIGISSIGWAFSENDELKDCGVRIFTKAENPKTGESLALPRRLARSARKRLARRKARLNHLKHLIANEFKLNYEDYQSFDESLAKAYKGSLISPYELRFRALNELLSKQDFARVILHIAKRRGYDDIKNNGDEEKSEILKAIKQNEEKLVNYQSVGEYLYKEYFQKFKENSKEFINVRNKKESYERCIAQSFLKDELKLIFQKQREFGFSFSKKFEEEVLSVAFYKRALKDFSHLVGNCSFFTDEKRAPKNSPLAFMFVALTRIINLLNNLKNTEGILYTKDDLNTLLNEVLKNGTLTYKQTKKLLGLSDDYEFKGEKGTYFIEFKKYKEFIKALGEHNLSQDNLNEIAKDITLIKDEIKLKKALAKYDLNQNQIDSLSKLEFKDHLNISFKALKLITPLMLEGKKYDEAYNELNLKVAINEDKKDFLPAFNETYYKDEVTNPVVLRAIKEYRKVLNALLKKYGKVHKINIELAREVGKNHSQRAKIEKEQNENYKAKKDAELECEKLGLKINSKNILKLRLFKEQKEFCAYSGEKIKISDLQDEKMLEIDHIYPYSRSFDDSYMNKVLVFTKQNQEKLNQTPFEAFGNDSAKWQKIEVLAKNLPTKKQKRILDKNYKDKEQKDFKDRNLNDTRYIARLVLNYTKDYLDFLPLSDDENTKLNDTQKGSKVHVEAKSGMLTSALRHTWGFSAKDRNNHLHHAIDAVIIAYANNSIVKAFSDFKKEQESNSAELYAKKISELDYKNKRKFFEPFSGFRQKVLDKIDEIFVSKPERKKPSGALHEETFRKEEEFYQSYGGKEGVLKALELGKIRKVNGKIVKNGDMFRVDIFKHKKTNKFYAVPIYTMDFALKVLPNKAVARSKKGEIKDWILMDENYEFCFSLYKDSLILIQTKDMQEPELVYFNAFTSSTVSLIVSKHDNKFETLSKNQKILFKNANEKEVIAKSIGIQNLKVFEKYIVSALGEVTKAEFRQREDFKK

SEQ ID NO: 313 - protein, 984 aa, Campylobacter coli
MARILAFDIGISSIGWAFSENDELKDCGVRIFTKAENPKTGESLALPRRLARSARKRLARRKARLNHLKHLIANEFKLNYEDYQSFDESLAKAYKGSLISPYELRFRALNELLSKQDFARVILHIAKRRGYDDIKNNGDEEKSEILKAIKQNEEKLVNYQSVGEYLYKEYFQKFKENSKEFINVRNKKESYERCIAQSFLKDELKLIFQKQREFGFSFSKKFEEEVLSVAFYKRALKDFSHLVGNCSFFTDEKRAPKNSPLAFMFVALTRIINLLNNLKNTEGILYTKDDLNALLNEVLKNGTLTYKQTKKLLGLSDDYEFKGEKGTYFIEFKKYKEFIKALGEHNLSQDDLNEIAKDITLIKDEIKLKKALAKYDLNQNQIDSLSKLEFKDHLNISFKALKLITPLMLEGKKYDEACNELNLKVAINEDKKDFLPAFNETYYKDEVTNPVVLRAIKEYRKVLNALLKKYGKVHKINIELAREVGKNYSQRAKIEKEQNENYKAKKDAELECEKLGLKINSKNILKLRLFKEQKEFCAYSGEKIKISDLQDEKMLEIDHIYPYSRSFDDSYMNKVLVFTKQNQEKLNQTPFEAFGNDSAKWQKIEVLAKNLPTKKQKRILDKNYKDKEQKNFKDRNLNDTRYIARLVLNYTKDYLDFLPLSDDENTKLNDTQKGSKVHVEAKSGMLTSALRHTWGFSAKDRNNHLHHAIDAVIIAYANNSIVKAFSDFKKEQESNSAELYAKKISELDYKNKRKFFEPFSGFRQKVLDKIDEIFVSKPERKKPSGALHEETFRKEEEFYQSYGGKEGVLKALELGKIRKVNGKIVKNGDMFRVDIFKHKKTNKFYAVPIYTMDFALKVLPNKAVARSKKGEIKDWILMDENYEFCFSLYKDSLILIQTKDMQEPEFVYYNAFTSSTVSLIVSKHDNKFETLSKNQKILFKNANEKEVIAKSIGIQNLKVFEKYIVSALGEVTKAEFRQREDFKK

SEQ ID NO: 314 - protein, 987 aa, Campylobacter coli
MARILAFDIGISSIGWAFSENDELKDCGVRIFTKAENPKTGESLALPRRLARSARKRLARRKARLNHLKHLIANEFKLNYEDYQSFDESLAKAYKGSLISPYELRFRALNELLSKQDFARVILHIAKRRGYDDIKNNGDEEKSEILKAIKQNEEKLVNYQSVGEYLYKEYFQKFKENSKEFINVRNKKESYERCIAQSFLKDELKLIFQKQREFGFSFSKKFEEEVLSVAFYKRALKDFSHLVGNCSFFTDEKRAPKNSPLAFMFVALTRIINLLNNLKNTEGILYTKDDLNTLLNEVLKNGTLTYKQTKKLLGLSDDYEFKGEKGTYFIEFKKYKEFIKALGEHNLSQDNLNEIAKDITLIKDEIKLKKALAKYDLNQNQIDSLSKLEFKDHLNISFKALKLITPLMLEGKKYDEAYNELNLKVAINEDKKDFLPAFNETYYKDEVTNPVVLRAIKEYRKVLNALLKKYGKVHKINIELAREVGKNHSQRAKIEKEQNENYKAKKDAELECEKLGLKINSKNILKLRLFKEQKEFCAYSGEKIKISDLQDEKMLEIDHIYPYSRSFDDSYMNKVLVFTKQNQEKLNQTPFEAFGNDSAKWQKIEVLAKNLPTKKQKRILDKNYKDKEQKDFKDRNLNDTRYIARLVLNYTKDYLDFLPLSDDENTKLNDTQKGSKVHVEAKSGMLTSALRHTWGFSAKDRNNHLHHAIDAVIIAYANNSIVKAFSDFKKEQESNSAELYAKKISELDYKNKRKFFEPFSGFRQKVLDKIDEIFVSKPERKKPSGALHEETFRKEEEFYQSYGGKEGVLKALELGKIRKVNGKIVKNGDMFRVDIFKHKKTNKFYAVPIYTMDFALKVLPNKAVARSKKGEIKDWILMDENYEFCFSLYKDSLILIQTKDMQEPELVYFNAFTSSTVSLIVSKHDNKFETLSKNQKILFKNANEKEVIAKSIGIQNLKVFEKYIVSALGEVTKAEFRQREDFKNELR

SEQ ID NO: 315 - protein, 984 aa, Campylobacter coli
MARILAFDIGISSIGWAFSENDELKDCGVRIFTKAENPKTGESLALPRRLARSARKRLARRKARLNHLKHLIANEFKLNYEDYQSFDESLAKAYKGSLISPYELRFRALNELLSKQDFARVILHIAKRRGYDDIKNNGDEEKSEILKAIKQNEEKLVNYQSVGEYLYKEYFQKFKENSKEFINVRNKKESYERCIAQSFLKDELKLIFQKQREFGFSFSKKFEEEVLSVAFYKRALKDFSHLVGNCSFFTDEKRAPKNSPLAFMFVALTRIINLLNNLKNTEGILYTKDDLNTLLNEVLKNGTLTYKQTKKLLGLSDDYEFKGEKGTYFIEFKKYKEFIKALGEHNLSQDNLNEIAKDITLIKDEIKLKKALAKYDLNQNQIDSLSKLEFKDHLNISFKALKLITPLMLEGKKYDEAYNELNLKVAINEDKKDFLPAFNETYYKDEVTNPVVLRAIKEYRKVLNALLKKYGKVHKINIELAREVGKNHSQRAKIEKEQNENYKAKKDAELECEKLGLKINSKNILKLRLFKEQKEFCAYSGEKIKISDLQDEKMLEIDHIYPYSRSFDDSYMNKVLVFTKQNQEKLNQTPFEAFGNDSAKWQKIEVLAKNLPTKKQKRILDKNYKDKEQKDFKDRNLNDTRYIARLVLNYTKDYLDFLPLSNDENTKLNDTQKGSKVHVEAKSGMLTSALRHTWGFSAKDRNNHLHHAIDAVIIAYANNSIVKAFSDFKKEQESNSAELYAKKISELDYKNKRKFFEPFSGFRQKVLDKIDEIFVSKPERKKPSGALHEETFRKEEEFYQSYGGKEGVLKALELGKIRKVNGKIVKNGDMFRVDIFKHKKTNKFYAVPIYTMDFALKVLPNKAVARSKKGEIKDWILMDENYEFCFSLYKDSLILIQTKDMQEPELVYFNAFTSSTVSLIVSKHDNKFETLSKNQKILFKNANEKEVIAKSIGIQNLKVFEKYIVSALGEVTKAEFRQREDFKK

SEQ ID NO: 316 - protein, 987 aa, Campylobacter coli
MARILAFDIGISSIGWAFSENDELKDCGVRIFTKAENPKTGESLALPRRLARSARKRLARRKARLNHLKHLIANEFKLNYEDYQSFDESLAKAYKGSLISPYELRFRALNELLSKQDFARVILHIAKRRGYDDIKNSDDKEKGAILKAIKQNEEKLANYQSVGEYLYKEYFQKFKENSKEFTNVRNKKESYERCIAQSFLKDELKLIFKKQREFGFSFSKKFEEEVLSVAFYKRALKDFSHLVGNCSFFTDEKRAPKNSPLAFMFVALTRIINLLNNLKNTEGILYTKDDLNALLNEVLKNGTLTYKQTKKLLGLSDDYEFKGEKGTYFIEFKKYKEFIKALGDHSLSQDDLNEIAKDITLIKDEIKLKKALAKYDLNQNQIDSLSKLEFKDHLNISFKALKLITPLMLEGKKYDEACNELNLKVAINEDKKDFLPAFNETYYKDEVTNPVVLRAIKEYRKVLNALLKKYGKVHKINIELAREVGKNYSQRAKIEKEQNENYKAKKDAELECEKLGLKINSKNILKLRLFKEQKEFCAYSGEKIKISDLQDEKMLEIDHIYPYSRSFDDSYMNKVLVFTKQNQEKLNKTPFEAFGNDSTKWQKIEVLAKNLPEKKQKRILDKNYKDKEQKDFKDRNLNDTRYIARLVLNYTKDYLDFLPLSDDENTKLNDTQKGSKVHVEAKSGMLTSALRHTWGFSTKDRNNHLHHAIDAVIIAYANNSIVKAFSDFKKEQESNSAELYAKKISELDYKNKRKFFEPFSGFRQKVLDKIDEIFVSKPERKKPSGALHEETFRKEEEFYQSYGGKEGVLKALELGKIRKVNGKIVKNGDMFRVDIFKHKKTNKFYAVPIYTMDFALKVLPNKAVARSKKGEIKDWILMDENYEFCFSLYKDSLILIQTKDMQEPEFVYYNAFTSSTVSLIVSKHDNKFETLSKNQKILFKNANEKEVIAKSIGIQNLKVFEKYIVSALGEVTKAEFRQREDFKNELR

SEQ ID NO: 317 - protein, 984 aa, Campylobacter coli
MARILAFDIGISSIGWAFSENDELKDCGVRIFTKAENPKTGESLALPRRLARSARKRLARRKARLNHLKHLIANEFKLNYEDYQSFDESLAKAYKGSLISPYELRFRALNELLSKQDFARVILHIAKRRGYDDIKNSDDKEKGAILKAIKQNEEKLTNYQSVGEYLYKEYFQKFKENSKEFTNVRNKKESYERCIAQSFLKDELKLIFKKQREFGFSFSKKFEEEVLSVAFYKRALKDFSHLVGNCSFFTDEKRAPKNSPLAFMFVALTRIINLLNNLKNTEGILYTKDDLNALLNEVLKNGTLTYKQTKKLLGLSDDYEFKGEKGTYFIEFKKYKEFIKALGDHSLSQDDLNEIAKDITLIKDEIKLKKALAKYDLNQNQIDSLSKLEFKDHLNISFKALKLITPLMLEGKKYDEACNELNLKVAINEDKKDFLPAFNETYYKDEVTNPVVLRAIKEYRKVLNALLKKYGKVHKINIELAREVGKNYSQRAKIEKEQNENYKAKKDAELECEKLGLKINSKNILKLRLFKEQKEFCAYSGEKIKISDLQDEKMLEIDHIYPYSRSFDDSYMNKVLVFTKQNQEKLNQTPFEAFGNDSAKWQKIEVLAKNLPTKKQKRILDKNYKDKEQKDFKDRNLNDTRYIARLVLNYTKDYLDFLPLSDDENTKLNDTQKGSKVHVEAKSGMLTSALRHTWGFSAKDRNNHLHHAIDAVIIAYANNSIVKAFSDFKKEQESNSAELYAKKISELDYKNKRKFFEPFSGFRQKVLDKIDEIFVSKPERKKPSGALHEETFRKEEEFYQSYGGKEGVLKALELGKIRKVNGKIVKNGDMFRVDIFKHKKTNKFYAVPIYTMDFALKVLPNKAVARSKKGEIKDWILMDENYEFCFSLYKDSLILIQTKDMQEPEFVYYNAFTSSTVSLIVSKHDNKFETLSKNQKILFKNANEKEVIAKSIGIQNLKVFEKYIVSALGEVTKAEFRQREDFKK

SEQ ID NO: 318 - protein, 965 aa, Campylobacter coli
MKIIGFNLGIANIGWALRENDEIIDCGVRVFDIPENPKNGNSLALERRENKARMKIVKRKKARMLATKTFLKKELNVDLSKLFLIGSTQSIYELRTKALSSLISKEELSAIILHIAKHRGYDDSALKNENGTIIEALNKNKEAMLKFKSVGEYFYKNFVQNKEVKKIRNTTEDYSNSVPRSLLKQELDLILDKQKELGLIKNADFKAKLFEIIFFKRPLKDFSNKIGNCIFFENEKRAAKNTISACEFVALGKVVNLLKSIEKDIGIVYEKDSINEIMSIILDKTSISYKKIRDILNLPQDINFKGLDYSKNNVENSKLVDLKKLNEFKKALGDGFTNLDKDILDSIATDITLTKDTATLKEKLKNYNVLNAEQIEKLSELVFNDHINLSLKALKQIIPLMYEGKRYDEACELCNFTIAKNQEKNEYLPLFEKTRFAKDISSPVVIRAICEFRKLLNDIIRRYGSVHKIHLELTRDFGISFNDRKKIIKEIEQNEQSRIKALETIKELKLEETSKNIQIVRLFEDQKGICPYSGLKMDLKCLDELVIDYIRPYNRSLDDSYSNKVLTFKKLNDLKQGKTPFEAFGEDEKLWAEINERIKEYNGKKRFKIFDKFFKDKKPFDFTEQTLQDTRWLTKLVASYLNEYLSFLPISEDENTALGYGEKGSKQHVILSSGMITQMLRNFWYLGFKNHKDYKNNAMDAIIVAFTTNSIIFTFNNFKKELDLAKAEFYANKISESDYLLKRKFLPPFSGFKEQALEKVKNIFVSHSLKIKNKGTLHELTPLKIKELKNTYGDLDLAVKLGKIRKYNDKYYANAKGSLVRTDLFADKENKFHAVSIYKADFSTKKLPNKTPATTSNGETKEGIEMNENYNFCMSLYKNTPISVKIKGMKEPIICYYHGFNTSGSKITYKKHDNNYHNLSEDEMVVFRKNDKESIVVGKILEIKKYSISPSGELSLIENEERKWF

SEQ ID NO: 319 - protein, 965 aa, Campylobacter coli
MKIIGFNLGIANIGWALRENDEIIDCGVRVFDIPENPKNGNSLALERRENKARMKIVKRKKARMLATKTFLKKELNVDLSKLFLIGSTQSIYELRTKALSSLISKEELSAIILHIAKHRGYDDSALKNENGTIIEALNKNKEAMLKFKSVGEYFYKNFVQNKEVKKIRNTTEDYSNSVPRSLLKQELDLILDKQKELGLIKNADFKAKLFEIIFFKRPLKDFSNKIGNCIFFENEKRAAKNTISACEFVALGKVVNLLKSIEKDIGIVYEKDSINEIMSIILDKTSISYKKIRDILNLPQDINFKGLDYSKNNAENSKLVDLKKLNEFKKALGDGFANLDKDILDSIATDITLTKDTATLKEKLKNYNVLNAEQIEKLSELVFNDHINLSLKALKQIIPLMYEGKRYDEACELCNFTIAKNQEKNEYLPLFEKTRFAKDISSPVVIRAICEFRKLLNDIIRRYGSVHKIHLELTRDFGISFNDRKKIIKEIEQNEQSRIKALETIKELKLEETSKNIQIVRLFEDQKGICPYSGLKMDLKCLDELVIDYIRPYNRSLDDSYSNKVLTFKKLNDLKQGKTPFEAFGEDEKLWAEINERIKEYNGKKRFKIFDKFFKDKKPFDFTEQTLQDTRWLTKLVASYLNEYLSFLPISEDENTALGYGEKGSKQHVVLSSGMITQMLRNFWYLGFKNHKNYKNNAMDAIIVAFTTNSIIFAFNNFKKELDLAKAEFYANKISESDYLLKRKFLPPFSGFKEQALEKVKNIFVSHSLKIKNKGTLHELTPLKIKELKNTYGDLDLAVKLGKIRKYNDKYYANTKGSLVRTDLFVDKENKFHAVSIYKADFSTKKLPNKTPATTSNGETKEGIEMNENYNFCMSLYKNTPVSVKIKGMKEPIICYYHGFNTSGSKITYKKHDNNYHNLSEDEMVVFRKNDKESIVVGKILEIKKYSISPSGELSLIENEKRKWF

SEQ ID NO: 320 - protein, 965 aa, Campylobacter coli
MKIIGFNLGIANIGWALRENDEIIDCGVRVFDIPENPKNGNSLALERRENKARMKIVKRKKARMLATKTFLKKELNVDLSKLFLIGSTQSIYELRTKALSSLISKEELSAIILHIAKHRGYDDSALKNENGTIIEALNKNKEAMLKFKSVGEYFYKNFVQNKEVKKIRNTTEDYSNSVPRSLLKQELDLILDKQKELGLIKNADFKEKLFEIIFFKRPLKDFSNKIGNCIFFENEKRAAKNTISACEFVALGKVVNLLKSIEKDIGIVYEKDSINEIMSIILDKTSISYKKIRDILNLPQDINFKGLDYSKNNAENSKLVDLKKLNEFKKALGDGFANLDKDILDSIATDITLTKDTATLKEKLKNYNVLNAEQIEKLSELVFNDHINLSLKALKQIIPLMYEGKRYDEACELCNFTIAKNQEKNEYLPLFEKTRFAKDISSPVVIRAICEFRKLLNDIIRRYGSVHKIHLELTRDFGISFNDRKKIIKEIEQNEQSRIKALETIKELKLEETSKNIQIVRLFEDQKGICPYSGLKMDLKCLDELVIDYIRPYNRSLDDSYSNKILTFKKLNDLKQGKTPFEAFGEDEKLWAEINERIKEYNGKKRFKIFDKFFKDKKPFDFTEQTLQDTRWLTKLVASYLNEYLLFLPINEDENTALGYGEKGSKQHVVLSSGMITQMLRNFWYLGFKNHKDYKNNAMDAIIVAFTTNSIIFAFNNFKKELDLAKAEFYANKISESDYLLKRKFLPPFSGFKEQALEKVKNIFVSHSLKIKNKGTLHELTPLKIKELKNTYGDLDLAVKLGKIRKYNDKYYANAKGSLVRTDLFADKENKFHAVSIYKADFSTKKLPNKTPATTSNGETKEGIEMNENYNFCMSLYKNTPISVKIKGMKEPIICYYHGFNTSGSKITYKKHDNNYHNLSEDEMVVFRKNDKESIVVGKILEIKKYSISPSGELSLIENEERKWF

SEQ ID NO: 321 - protein, 933 aa, Campylobacter coli
MKIIGFNLGIANIGWALRENDEIIDCGVRVFDIPENPKNGNSLALERRENKARMKIVKRKKARMLATKTFLKKELNVDLSKLFLIGSTQSIYELRTKALSSLISKEELSVIILHIAKHRGYDDSALKNENGTIIEALNKNKETMLKFKSVGEYFYKNFVQNKEVKKIRNTTEDYSNSVPRSLLKQELDLILDRQKELGLIKNADFKAKLFEIIFFKRPLKDFSNKIGNCIFFENEKRAAKNTISACEFVALGKVVNLLKSIEKDIGIVYEKDSINEIMSIILDKTSISYKKIRDILNLPQDINFKGLDYSKNNVENSKLVDLKKLNEFKKALGDGFTNLDKDILDSIATDITLTKDTATLKEKLKNYNVLNAEQIEKLSELVFNDHINLSLKALKQIIPLMYEGKRYDEACELCNFTIAKNQEKNEYLPLFEKTRFAKDISSPVVIRAICEFRKLLNDIIRRYGSVHKIHLELTRDFGISFNDRKKIIKEIEQNEQSRIKALETIKELKLEETSKNIQIVRLFEDQKGICPYSGLKMDLKCLDELVIDYIRPYNRSLDDSYSNKVLTFKKLNDLKQGKTPFEAFGEDEKLWAEINERIKEYNGKKRFKIFDKFFKDKKPFDFTEQTLQDTRWLTKLVASYLNEHLSFLPISEDENTALGYGEKGSKQHVILSSGMITQMLRNFWYLGFKNHKDYKNNAMDAIIVAFTTNSIIFTFNNFKKELDLAKAEFYANKISESDYLLKRKFLPPFSGFKEQALEKVKNIFVSHSLKIKNKGTLHELTPLKIKELKNTYGDLDLAVKLGKIRKYNDKYYANANGSLVRSDLFIDKKNKFHAVPIYKADFSTKKLPNKTPATTSNGETKEGIEMNENYNFCMSLYKNTPISVKIKGMKESIICYYHGFNTSGSKITYKKHDNNYHNLSEDEMVVFRKNDKE

SEQ ID NO: 322 - protein, 666 aa, Campylobacter jejuni
KGEKGTYFIEFKKYKEFIKALDEHSLSQDDLNEIAKDITLIKDEIKLKKALAKYDLKENQIDSLSKLEFKDHLNISFKALKLITPLMLEGKKYDEACNELNLKVAINEDKKDFLPAFNETYYKDEVTNPVVLRAIKEYRKILNALLKKYGKVHKINIELAREVGKNHSQRAKIEKEQNENYKAKKDAELECEKLGLKINSKNILKLRLFKEQKEFCVYSGEKIKLSDLQDEKMLEIDHIYPYSRSFDDSYMNKVLVFAKQNQEKLNKTPFEAFGNDSTKWQKIEVLTKNLPTKKQKRILDKNYKDKEQKDFKDRNLNDTRYIARLVLNYTKDYLDFLPLSDDENTKLNDTQKGSKVHVEAKSGMLTSALRHTWGFSTKDRNNHLHHAIDAAIIAYANNSIVKAFSDFKKEQESNSAELYAKKISELDYKNKRKFFEPFSGFRQKVLDKIDEIFVSKPERKKPSGALHEETFRKEEEFYQSYGGKEGVLKALELGKIRKVNGKIVKNGDMFRVDIFKHKKTNKFYAVPIYTMDFALKVLPNKAVARSKKGEIKDWILMDEDYEFCFSLYKDSLILIQTKDMQEPELVYFNAFTSSTVSLIVSKHDNKFETLSKNQKILFKNANEKEVIAKSIGIQNLKVFEKYIVSALGEVTKAEFRQREDFKNELR

SEQ ID NO: 323 - protein, 190 aa, Campylobacter jejuni
MAFDIGISSIGWAFSENDELKDCGVRIFTKVENPKTGESLALPRRLARSARKRLARRKARLNHLKHLIANEFKLNYEDYQSFDESLAKAYKGSLISPYELRFRALNELLSKQDFARVILHIAKRRGYDDIKNSDDKEKGAILKAIKQNEEKLANYQSVGEYLYKEYFQKFKENSKEFTNVRNKKKVMNAA

SEQ ID NO: 324 - protein, 985 aa, Campylobacter jejuni
MAKILAFDIGISSIGWAFVENDELKDCGVRIFTKAENPKTGESLALPRRLARSARKRLARRKARLNHLKHLIANEFKLNYEDYQSFDESLAKAYKGTLISPYELRFKALNELLSKQDLARVILHIAKRRGYDNIKNSDDKEKGAILKAVKENEEKLANYKSVGEYLYKEYFQKFKENSKEFINVRNKKESYERCIAQSFLKDELKLIFQKQREFGFNFSKKFEEEVLSVAFYKRALKDFSHLVGNCSFFVDEKRAPKNSPLAFEFVALTRIVNLLNNLNKNNSYIKDDLNALLSEVLKNGTLTYKQTKKILGLSDDYEFKGQKGNYFIEFKKYKEFIKALCEHNLNQDDLNEIAKDITLVKDETKLKKALAKYDLNQNQIENLSKIEFKDHLNISFKALKLIVPLMREGKKYDEVCNELNLKTAINEDKKEFLPAFNETYYKDEVNNPVVLRAIKEYRKVLNSLLKKYGKVHKINIELAREVGKNHRERSKIEKEQNENFKAKKDAELECEKLGLKINSKNILKLRLFKEQKEFCVYSGEKIKISDLQDEKMLEIDHIYPYSRSFDDSYMNKVLVFTKQNQEKLNKTPFEAFGKDDVKWQKIETLAKNLPAKKQKRILDKNYKDKEQKDFKDRNLNDTRYIARLVLNYTKDYLEFLPLSDDENIKLNDTQKGSKVHVEAKSGMLTSVLRHTWGFSTKDRNNHLHHAIDAVIIAYANASVVKAFSDFKKEQENYTAELYAKKINELDFKNKRKFFEPFSNFRQKVLEKIDEIFVSKPERKKPSGALHEETFYKEEEFYKEYGGKEGVLKALELGKIRKVNGKIVSNANMFRVDIFKYKKTNKFYAVPIYTMDFALGILPNKAVVGGKDKQGIIKDWLLMDENYEFCFSLYKDSLILLQTKDMQEPELVYFKSFKSSTAGLVVSKHDNKFENLNENQKKLFKSANEKKVVAEGIGIQNLKVFEKYIVSALGEITKAEIKERENFKKK

SEQ ID NO: 325 - protein, 987 aa, Campylobacter jejuni
MARILAFDIGISSIGWAFSENDELKDCGVRIFTKAENPKTGESLALPRCLARSARKRLARRKARLNHLKHLIANEFKLNYEDYQSFDESLAKAYKGSLISPYELRFRALNELLSKQDFARVILHIAKRRGYDDIKNNGDEEKGEILKAIKQNEEKLVSYQSVGEYLYKEYFQKFKENSKEFINVRNKKESYERCIAQSFLKDELKLIFQKQRKFGFSFSKKFEEEVLSVAFYKRALKDFSHLVGNCSFFTDEKRAPKNSPLAFMFVALTRIINLLNNLKNTEGILYTKDDLNTLLNEVLKNGTLTYKQTKKLLGLSNDYEFKGEKGTYFIEFQKYKEFVKALGEHNLSQDDLNEIAKDITLIKDEIKLKKALAKYDLNQNQIDSLSKLEFKDHLNISFKALKLITPLMLEGKKYDEACNELNLKVAINEDKKDFLPAFNETYYKDEVTNPVVLRAIKEYRKVLNALLKKYGKVHKINIELAREVGKNHSQRAKIEKEQNENYKAKKDAELECEKLGLKINSKNILKLRLFKEQKEFCVYSGEKIKISDLQDEKMLEIDHIYPYSRSFDDSYMNKVLVFTKQNQEKLNKTPFETFGNDRVKWQKIEVLAKNLPTKKQKRILDKNYKDKEQKDFKDRNLNDTRYIARLVLNYTKDYLDFLPLSDDENTKLNDTQKGSKVHVEAKSGMLTSTLRHTWGFSTKDRNNHLHHAIDAAIIAYANNSIVKAFSDFKKEQESNTAELYAKKISELDYKNKRKFFEPFSGFRQKLLDKIDEIFVSKPERKKPSGALHEETFRKEEEFYQSYGGKEGVLKALELGKIRKVNGKIVSNGDMFRVDIFKHKKTNKFYAVPIYTMDFALKVLPNKAVVQGKDKKSGLIKDWILMDENYEFCFSLYKDSLILIQTKDMQEPELVYYERLDSSNASLTVSKHDNKFETLSKNQKILFKNANEKEVIAKSIGIQNLKVFEKYIVSALGEVTKAEFRQREDFKK

SEQ ID NO: 326 - protein, 987 aa, Campylobacter jejuni
MARILAFDIGISSIGWAFSENDELKDCGVRIFTKAENPKTGESLALPRRLARSARKRLARRKARLNHLKHLIANEFKLNYEDYQSFDEGLAKAYKGSLISPYELRFRALNELLSKQDFARVILHIAKRRGYDDIKNNGDEEKSEILKAIKQNEEKLVNYQSVGEYLYKEYFQKFKENSKEFINVRNKKESYERCIAQSFLKDELKLIFQKQREFGFSFSKKFEEEVLSVAFYKRALKDFSHLVGNCSFFTDEKRAPKNSPLAFMFVALTRIINLLNNLKNTEGILYTKDDLNTLLNEVLKNGTLTYKQTKKLLGLSDDYEFKGEKGTYFIEFKKYKEFIKALGEHNLSQDNLNEIAKDITLIKDEIKLKKALAKYDLNQNQIDSLSKLEFKDHLNISFKALKLITPLMLEGKKYDEAYNELNLKVAINEDKKDFLPAFNETYYKDEVTNPVVLRAIKEYRKVLNALLKKYGKVHKINIELAREVGKNHSQRAKIEKEQNENYKAKKDAELECEKLGLKINSKNILKLRLFKEQKEFCAYSGEKIKISDLQDEKMLEIDHIYPYSRSFDDSYMNKVLVFTKQNQEKLNQTPFEAFGNDSAKWQKIEVLAKNLPTKKQKRILDKNYKDKEQKDFKDRNLNDTRYIARLVLNYTKDYLDFLPLSDDENTKLNDTQKGSKVHVEAKSGMLTSALRHTWGFSAKDRNNHLHHAIDAVIIAYANNSIVKAFSDFKKEQESNSAELYAKKISELDYKNKRKFFEPFSGFRQKVLDKIDEIFVSKPERKKPSGALHEETFRKEEEFYQSYGGKEGVLKALELGKIRKVNGKIVKNGDMFRVDIFKHKKTNKFYAVPIYTMDFALKVLPNKAVVQGKDKKSGLIKDWILMDENYEFCFSLYKDSLILIQTKDMQEPELVYFNAFTSSTVSLIVSKHDNKFETLSKNQKILFKNANEKEVIAKSIGIQNLKVFEKYIVSALGEVTKAEFRQREDFKK

SEQ ID NO: 327 - protein, 961 aa, Campylobacter jejuni
MARILAFDIGISSIGWAFSENDELKDCGVRIFTKAENPKTGESLALPRRLARSARKRLARRKARLNHLKHLIANEFKLNYEDYQSFDESLAKAYKGSLISPYELRFRALNELLSKQDFARVILHIAKRRGYDDIKNNGDEEKGKILKAIKQNEEKLVNYQSVGEYLYKEYFQKFKENSKEFINVRNKKESYERCITQSFLKYELKLIFQKQREFGFSFSKKFEEEVLSVAFYKRALKDFSHLVGNCSFFSDEKRAPKNSPLAFMFVALTRIINLLNNLKNTEGILYTKDDLNALLNEVLKNGTLTYKQTKKLLGLSDDYEFKGEKGTYFIEFKKYKEFIKALGEHNLSQDDLNEIAKDITLIKDEIKLKKALAKYDLNQNQIDSLSKLEFKDHLNIGFKALKLITPLMLEGKKYDEACNELNLKVAINEDKKDFLPAFNETYYKDEVTNPVVLRAIKEYRKVLNALLKKYGKVHKINIELAREVGKNHSQRAKIEKEQNENYKAKKDAELECEKLGLKINSKNILKLRLFKEQKEFCAYSGEKIKLSDLQDEKMLEIDHIYPYSRSFDDSYMNKVLVFTKQNQEKLNKTPFEAFGNDNVKWQKIEVLAKNLPEKKQKRILDKNYKDKEQKDFKDRNLNDTRYIARLVLNYTKDYLDFLPLSDDENTKLKGSKVHVEAKSGMLTSALRHTWGFSTKDRNNHLHHAIDAAIIAYANNSIVKDFSDFKKEQESNSAELYAKKISELDYKNKRKFFEPFSGFRQKVLDKIDEIFVSKPERKKPSGALHEETFRKEEEFYQSYGGKEGVLKALELGKIRKVNGKIVKNGDMFRVDIFKHKKTNKFYAVPIYTMDFALKVLPNKAVARSKKGEIKDWILMDENYEFCFSLYKDSLILIQTKDMQEPELVYFNAFTSSTVSLIVSKHDNKFETLSKNLKVFEKYIVSALGEVTKAEFRQREDFKNELR

SEQ ID NO: 328 - protein, 984 aa, Campylobacter jejuni
MARILAFDIGISSIGWAFSENDELKDCGVRIFTKAENPKTGESLALPRRLARSARKRLARRKARLNHLKHLIANEFKLNYEDYQSFDESLAKAYKGSLISPYELRFRALNELLSKQDFARVILHIAKRRGYDDIKNNGDEEKGKILKAIKQNEEKLVNYQSVGEYLYKEYFQKFKENSKEFINVRNKKESYERCITQSFLKYELKLIFQKQREFGFSFSKKFEEEVLSVAFYKRALKDFSHLVGNCSFFTDEKRAPKNSPLAFMFVALTRIINILNNLKNTEGILYTKDDLNALLNEVLKNGTLTYKQTKKLLGLSDDYEFKGEKGTYFIEFKKYKEFIKALGEHNLSQDDLNEIAKDITLIKDEIKLKKALAKYDLNQNQIDSLSKLEFKDHLNISFKALKLITPLMLEGKKYDEACNELNLKVAINEDKKDFLPAFNETYYKDEVTNPVVLRAIKEYRKILNALLKKYGKVHKINIELAREVGKNHSQRAKIEKEQNENYKAKKDAEIECEKLGLKINSKNILKLRLFKEQKEFCAYSGEKIKISDLQDEKMLEIDHIYPYSRSFDDSYMNKVLVFTKQNQEKLNQTPFEAFGNDSAKWQKIEVLAKNLPTKKQKRILDKNYKDKEQKDFKDRNLNDTRYIARLVLNYTKDYLDFLPLSDDENTKLNDTQKGSKVHVEAKSGMLTSALRHTWGFSAKDRNNHLHHAIDAVIIAYANNSIVKAFSDFKKEQESNSAELYAKKISELDYKNKRKFFEPFSGFRQKVLDKIDEIFVSKPERKKPSGALHEETFRKEEEFYQSYGGKEGVLKALELGKIRKVNGKIVKNGDMFRVDIFKHKKTNKFYAVPIYTMDFALKVLPNKAVARSKKGEIKDWILMDENYEFCFSLYKDSLILIQTKDMQEPEFVYYNAFTSSTVSLIVSKHDNKFETLSKNQKILFKNANEKEVIAKSIGIQNLKVFEKYIVSALGEVTKAEFRQREDFKK

SEQ ID NO: 329 - protein, 987 aa, Campylobacter jejuni
MARILAFDIGISSIGWAFSENDELKDCGVRIFTKAENPKTGESLALPRRLARSARKRLARRKARLNHLKHLIANEFKLNYEDYQSFDESLAKAYKGSLISPYELRFRALNELLSKQDFARVILHIAKRRGYDDIKNNGDEEKGKILKAIKQNEEKLVSYQSVGEYLYKEYFQKFKENSKEFINVRNKKESYERCIAQSFLKDELKLIFQKQREFGFSFSKKFEEEVLSVAFYKRALKDFSHLVGNCSFLLMKKERQKNSPLAFMFVALTRIINLLNNLKNTEGILYTKDDLNTLLNEALKNGTLTYKQTKKLLGLSNDYEFKGEKGTYFIEFQKYKEFVKALGEHNLSQDDLNEIAKDITLIKDEIKLKKALAKYDLNQNQIDSLSKLEFKDHLNISFKALKLITPLMLEGKKYDEACNELNLKVAINEDKKDFLPAFNETYYKDEVTNPVVLRAIKEYRKVLNALLKKYGKVHKINIELAREVGKNHSQRAKIEKEQNENYKAKKDAELECEKLGLKINSKNILKLRLFKEQKEFCVYSGEKIKISDLQDEKMLEIDHIYPYSRSFDDSYMNKVLVFTKQNQEKLNKTPFETFGNDRVKWQKIEVLAKNLPTKKQKRILDKNYKDKEQKDFKDRNLNDTRYIARLVLNYTKDYLDFLPLSDDENTKLNDTQKGSKVHVEAKSGMLTSTLRHTWGFSTKDRNNHLHHAIDAAIIAYANNSIVKAFSDFKKEQESNTAELYAKKISELDYKNKRKFFEPFSGFRQKLLDKIDEIFVSKPERKKPSGALHEETFRKEEEFYQSYGGKEGVLKALELGKIRKVNGKMVKNGDMFRVDIFKHKKTNKFYAVPIYTMDFALKVLPNKAVVQGKDKKSGLIKDWILMDENYEFCFSLYKDSLILIQTKDMQEPELVYYERLDSSNASLTVSKHDNKFETLSKNQKILFKNANEKEVIAKSIGIQNLKVFEKYIVSALGEVTKAEFRQREDFKK

SEQ ID NO: 330 - protein, 987 aa, Campylobacter jejuni
MARILAFDIGISSIGWAFSENDELKDCGVRIFTKAENPKTGESLALPRRLARSARKRLARRKARLNHLKHLIANEFKLNYEDYQSFDESLAKAYKGSLISPYELRFRALNELLSKQDFARVILHIAKRRGYDDIKNNGDEEKSEILKAIKQNEEKLVNYQSVGEYLYKEYFQKFKENSKEFINVRNKKESYERCIAQSFLKDELKLIFQKQREFGFSFSKKFEEEVLSVAFYKRALKDFSHLVGNCSFFTDEKRAPKNSPLAFMFVALTRIINLLNNLKNTEGILYTKDDLNTLLNEVLKNGTLTYKQTKKLLGLSDDYEFKGEKGTYFIEFKKYKEFIKALGEHNLSQDNLNEIAKDITLIKDEIKLKKALAKYDLNQNQIDSLSKLEFKDHLNISFKALKLITPLMLEGKKYDEAYNELNLKVAINEDKKDFLPAFNETYYKDEVTNPVVLRAIKEYRKVLNALLKKYGKVHKINIELAREVGKNHSQRAKIEKEQNENYKAKKDAELECEKLGLKINSKNILKLRLFKEQKEFCAYSGEKIKISDLQDEKMLEIDHIYPYSRSFDDSYMNKVLVFTKQNQEKLNQTPFEAFGNDSAKWQKIEVLAKNLPTKKQKRILDKNYKDKEQKDFKDRNLNDTRYIARLVLNYTKDYLDFLPLSDDENTKLNDTQKGSKVHVEAKSGMLTSALRHTWGFSAKDRNNHLHHAIDAVIIAYANNSIVKAFSDFKKEQESNSAELYAKKISELDYKNKRKFFEPFSGFRQKVLDKIDEIFVSKPERKKPSGALHEETFRKEEEFYQSYGGKEGVLKALELGKIRKVNGKIVKNGDMFRVDIFKHKKTNKFYPVPIYTMDFALKVLPNKAVVQGKDKKSGLIKDWILMDENYEFCFSLYKDSLILIQTKDMQEPELVYFNAFTSSTVSLIVSKHDNKFETLSKNQKILFKNANEKEVIAKSIGIQNLKVFEKYIVSALGEVTKAEFRQREDFKK

SEQ ID NO: 331 - protein, 987 aa, Campylobacter jejuni
MARILAFDIGISSIGWAFSENDELKDCGVRIFTKAENPKTGESLALPRRLARSARKRLARRKARLNHLKHLIANEFKLNYEDYQSFDESLAKAYKGSLISPYELRFRALNELLSKQDFARVILHIAKRRGYDDIKNNGDEEKSEILKAIKQNEEKLVNYQSVGEYLYKEYFQKFKENSKEFINVRNKKESYERCIAQSFLKDELKLIFQKQREFGFSFSKKFEEEVLSVAFYKRALKDFSHLVGNCSFFTDEKRAPKNSPLAFMFVALTRIINLLNNLKNTEGILYTKDDLNTLLNEVLKNGTLTYKQTKKLLGLSDDYEFKGEKGTYFIEFKKYKEFIKALGEHNLSQDNLNEIAKDITLIKDEIKLKKALAKYDLNQNQIDSLSKLEFKDHLNISFKALKLITPLMLEGKKYDEAYNELNLKVAINEDKKDFLPAFNETYYKDEVTNPVVLRAIKEYRKVLNALLKKYGKVHKINIELAREVGKNHSQRAKIEKEQNENYKAKKDAELECEKLGLKINSKNILKLRLFKEQKEFCAYSGEKIKISDLQDEKMLEIDHIYPYSRSFDDSYMNKVLVFTKQNQEKLNQTPFEAFGNDSAKWQKIEVLAKNLPTKKQKRILDKNYKDKEQKDFKDRNLNDTRYIARLVLNYTKDYLDFLPLSDDENTKLNDTQKGSKVHVEAKSGMLTSALRHTWGFSAKDRNNHLHHAIDAVIIAYANNSIVKAFSDFKKEQESNSAELYAKKISELDYKNKRKFFEPFSGFRQKVLDKIDEIFVSKPERKKPSGALHEETFRKEEEFHQSYGGKEGVLKALELGKIRKVNGKIVKNGDMFRVDIFKHKKTNKFYAVPIYTMDFALKVLPNKAVVQGKDKKSGLIKDWILMDENYEFCFSLYKDSLILIQTKDMQEPELVYFNAFTSSTVSLIVSKHDNKFETLSKNQKILFKNANEKEVIAKSIGIQNLKVFEKYIVSALGEVTKAEFRQREDFKK

SEQ ID NO: 332 - protein, 987 aa, Campylobacter jejuni
MARILAFDIGISSIGWAFSENDELKDCGVRIFTKAENPKTGESLALPRRLARSARKRLARRKARLNHLKHLIANEFKLNYEDYQSFDESLAKAYKGSLISPYELRFRALNELLSKQDFARVILHIAKRRGYDDIKNNGDEEKSEILKAIKQNEEKLVNYQSVGEYLYKEYFQKFKENSKEFINVRNKKESYERCIAQSFLKDELKLIFQKQREFGFSFSKKFEEEVLSVAFYKRALKDFSHLVGNCSFFTDEKRAPKNSPLAFMFVALTRIINLLNNLKNTEGILYTKDDLNTLLNEVLKNGTLTYKQTKKLLGLSDDYEFKGEKGTYFIEFKKYKEFIKALGEHNLSQDNLNEIAKDITLIKDEIKLKKALAKYDLNQNQIDSLSKLEFKDHLNISFKALKLITPLMLEGKKYDEAYNELNLKVAINEDKKDFLPAFNETYYKDEVTNPVVLRAIKEYRKVLNALLKKYGKVHKINIELAREVGKNHSQRAKIEKEQNENYKAKKDAELECEKLGLKINSKNILKLRLFKEQKEFCAYSGEKIKISDLQDEKMLEIDHIYPYSRSFDDSYMNKVLVFTKQNQEKLNQTPFEAFGNDSAKWQKIEVLAKNLPTKKQKRILDKNYKDKEQKDFKDRNLNDTRYIARLVLNYTKDYLDFLPLSDDENTKLNDTQKGSKVHVEAKSGMLTSALRHTWGFSAKDRNNHLHHAIDAVIIAYANNSIVKAFSDFKKEQESNSAELYAKKISELDYKNKRKFFEPFSGFRQKVLDKIDEIFVSKPERKKPSGALHEETFRKEEEFYQSYGGKEGVLKALELGKIRKVNGKIVKNGDMFRVDIFKHKKTNKFYAVPIYTMDFALKVLPNKAVVQGKDKKSGLIKDWILMDENYEFCFSLYKDSLILIQTKDMQEPELVYFNAFTSSTVSLIVSKHDNKFETLSKNQKILFKNANEKEVIAKSIGIQNLKVFEKYIVSALGEVTKAEFRQREDFKK

SEQ ID NO: 333 - protein, 861 aa, Campylobacter jejuni
MARILAFDIGISSIGWAFSENDELKDCGVRIFTKAENPKTGESLALPRRLARSARKRLARRKARLNHLKHLIANEFKLNYEDYQSFDESLAKAYKGSLISPYELRFRALNELLSKQDFARVILHIAKRRGYDDIKNNGDEEKSEILKAIKQNEEKLVNYQSVGEYLYKEYFQKFKENSKEFINVRNKKESYERCITQSFLKDELKLIFQKQREFGFSFSKKFEEEVLSVAFYKRALKDFSHLVGNCSFFTDEKRAPKNSPLAFMFVALTRIINILNNLKNTEGILYTKDDLNALLNEVLKNGTLTYKQTKKLLGLSDDYEFKGEKGTYFIEFKKYKEFIKALGEHNLSQDDLNEIAKDITLIKDEIKLKKALAKYDLNQNQIDSLSKLEFKDHLNISFKALKLITPLMLEGKKYDEACNELNLKVAINEDKKDFLPAFNETYYKDEVTNPVVLRAIKEYRKILNALLKKYGKVHKINIELAREVGKNHSQRAKIEKEQNENYKAKKDAEIECEKLGLKINSKNILKLRLFKEQKEFCAYSGEKIKLSDLQDEKMLEIDHIYPYSRSFDDSYMNKVLVFTKQNQEKLNKTPFEAFGNDSTKWQKIEVLAKNLPEKKQKRILDKNYKDKEQKDFKDRNLNDTRYIARLVLNYTKDYLDFLPLSDDENTKLNDTQKGSKVHVEAKSGMLTSALRHTWGFSAKDRNNHLHHAIDAAIIAYANNSIVKAFSDFKKEQESNSVELYAKKISELDYKNKRKFFEPFSGFRQKVLDKIDEIFVSKPERKKPSGALHEETFRKEEEFYQSYGGKEGVLKALELGKIRKVNGKIVKNGDMFRVDIFKHKKTNKFLCCANLYYGFCFKSITK

SEQ ID NO: 334 - protein, 462 aa, Campylobacter jejuni
MARILAFDIGISSIGWAFSENDELKDCGVRIFTKAENPKTGESLALPRRLARSARKRLARRKARLNHLKHLIANEFKLNYEDYQSFDESLAKAYKGSLISPYELRFRALNELLSKQDFARVILHIAKRRGYDDIKNNGDEEKSEILKAIKQNEEKLVNYQSVGEYLYKEYFQKFKENSKEFINVRNKKESYERCITQSFLKDELKLIFQKQREFGFSFSKKFEEEVLSVAFYKRALKDFSHLVGNCSFFTDEKRAPKNSPLAFMFVALTRIINILNNLKNTEGILYTKDDLNALLNEVLKNGTLTYKQTKKLLGLSDDYEFKGEKGTYFIEFKKYKEFIKALGEHNLSQDDLNEIAKDITLIKDEIKLKKALAKYDLNQNQIDSLSKLEFKDHLNISFKALKLITPLMLEGKKYDEACNELNLKVAINEDKKDFLPAFNETYYKDEVTNPVVLRAIKEYRKS

SEQ ID NO: 335 - protein, 984 aa, Campylobacter jejuni
MARILAFDIGISSIGWAFSENDELKDCGVRIFTKAENPKTGESLALPRRLARSARKRLARRKARLNHLKHLIANEFKLNYEDYQSFDESLAKAYKGSLISPYELRFRALNELLSKQDFARVILHIAKRRGYDDIKNNGDEEKSEILKAIKQNEEKLVNYQSVGEYLYKEYFQKFKENSKEFINVRNKKESYERCITQSFLKDELKLIFQKQREFGFSFSKKFEEEVLSVAFYKRALKDFSHLVGNCSFFTDEKRAPKNSPLAFMFVALTRIINLLNNLKNTEGILYTKDDLNALLNEVLKNGTLTYKQTKKLLGLSDDYEFKGEKGTYFIEFKKYKEFIKALDEHSLSQDDLNEIAKDITLIKDEIKLKKALAKYDLNQNQIDSLSKLEFKDHLNISFKALKLITPLMLEGKKYDEACNELNLKVAINEDKKDFLPAFNETYYKDEVTNPVVLRAIKEYRKILNALLKKYGKVHKINIELAREVGKNHSQRAKIEKEQNENYKAKKDAEIECEKLGLKINSKNILKLRLFKEQKEFCAYSGEKIKISDLQDEKMLEIDHIYPYSRSFDDSYMNKVLVFTKQNQEKLNKTPFEAFGNDGVKWQKIEVLAKNLPEKKQKRILDKNYKDKEQKDFKDRNLNDTRYIARLVLNYTKDYLDFLPLSDDENTKLNDTQKGSKVHVEAKSGMLTSALRHTWGFSTKDRNNHLHHAIDAAIIAYANNSIVKAFSDFKKEQESNSAELYAKKISELDYKNKRKFFEPFSGFRQKVLDKIDEIFVSKPERKKPSGALHEETFRKEEEFYQSYGGKEGVLKALELGKIRKVNGKIVKNGDMFRVDIFKHKKTNKFYAVPIYTMDFALKVLPNKAVARSKKGEIKDWILMDENYEFCFSLYKDSLILIQTKDMQEPELVYFNAFTSSTVSLVVSKHDNKFETLSKNQKILFKNANEKEVIAKSIGIQNLKVFEKYIVSALGEVTKAEFRQREDFKK

SEQ ID NO: 336 - protein, 984 aa, Campylobacter jejuni
MARILAFDIGISSIGWAFSENDELKDCGVRIFTKAENPKTGESLALPRRLARSARKRLARRKARLNHLKHLIANEFKLNYEDYQSFDESLAKAYKGSLISPYELRFRALNELLSKQDFARVILHIAKRRGYDDIKNSDDKEKGAILKAIKQNEEKLANYQSVGEYLYKEYFQKFKENSKEFTNVRNKKESYERCIAQSFLKDELKLIFKKQREFGFSFSKKFEEEVLSVAFYKRALKDFSHLVGNCSFFTDEKRAPKNSPLAFMFVALTRIINLLNNLKNTEGILYTKDDLNALLNEVLKNGTLTYKQTKKLLGLSDDYEFKGEKGTYFIEFKKYKEFIKALGDHSLSQDDLNEIAKDITLIKDEIKLKKALAKYDLNQNQIDSLSKLEFKDHLNISFKALKLITPLMLEGKKYDEACNELNLKVAINEDKKDFLPAFNETYYKDEVTNPVVLRAIKEYRKVLNALLKKYGKVHKINIELAREVGKNYSQRAKIEKEQNENYKAKKDAELECEKLGLKINSKNILKLRLFKEQKEFCAYSGEKIKISDLQDEKMLEIDHIYPYSRSFDDSYMNKVLVFTKQNQEKLNQTPFEAFGNDSAKWQKIEVLAKNLPTKKQKRILDKNYKDKEQKDFKDRNLNDTRYIARLVLNYTKDYLDFLPLSDDENTKLNDTQKGSKVHVEAKSGMLTSALRHTWGFSAKDRNNHLHHAIDAVIIAYANNSIVKAFSDFKKEQESNSAELYAKKISELDYKNKRKFFEPFSGFRQKVLDKIDEIFVSKPERKKPSGALHEETFRKEEEFYQSYGGKEGVLKALELGKIRKVNGKIVKNGDMFRVDIFKHKKTNKFYAVPIYTMDFALKVLPNKAVARSKKGEIKDWILMDENYEFCFSLYKDSLILIQTKDMQEPEFVYYNAFTSSTVSLIVSKHDNKFETLSKNQKILFKNANEKEVIAKSIGIQNLKVFEKYIVSALGEVTKAEFRQREDFKK

SEQ ID NO: 337 - protein, 984 aa, Campylobacter jejuni
MARILAFDIGISSIGWAFSENDELKDCGVRIFTKAENPKTGESLALPRRLARSARKRLARRKARLNHLKHLIANEFKLNYEDYQSFDESLAKAYKGSLISPYELRFRALNELLSKQDFARVILHIAKRRGYDDIKNSDDKEKGAILKAIKQNEEKLANYQSVGEYLYKEYFQKFKENSKEFTNVRNKKESYERCIAQSFLKDELKLIFKKQREFGFSFSKKFEEEVLSVAFYKRALKDFSHLVGNCSFFTDEKRAPKNSPLAFMFVALTRIINLLNNLKNTEGILYTKDDLNTLLNEVLKNGTLTYKQTKKLLGLSDDYEFKGEKGTYFIEFKKYKEFIKALGEHNLSQDDLNEIAKDITLIKDEIKLKKALAKYDLNQNQIDSLSKLEFKDHLNISFKALKLITPLMLEGKKYDEACNELNLKVAINEDKKDFLPAFNETYYKDEVTNPVVLRAIKEYRKVLNALLKKYGKVHKINIELAREVGKNYSQRAKIEKEQNENYKAKKDAELECEKLGLKINSKNILKLRLFKEQKEFCAYSGEKIKISDLQDEKMLEIDHIYPYSRSFDDSYMNKVLVFTKQNQEKLNKTPFEAFGNDSTKWQKIEVLAKNLPEKKQKRILDKNYKDKEQKDFKDRNLNDTRYIARLVLNYTKDYLDFLPLSDDENTKLNDTQKGLKVHVEAKSGMLTSALRHTWGFSAKDRNNHLHHAIDAVIIAYANNSIVKAFSDFKKEQESNSAELYAKKISELDYKNKRKFFEPFSGFRQKVLDKIDEIFVSKPERKKPSGALHEETFRKEEEFYQSYGGKEGVLKALELGKIRKVNGKIVKNGDMFRVDIFKHKKTNKFYAVPIYTMDFALKVLPNKAVARSKKGEIKDWILMDENYEFCFSLYKDSLILIQTKDMQEPEFVYYNAFTSSTVSLIVSKHDNKFETLSKNQKILFKNANEKEVIAKSIGIQNLKVFEKYIVSALGEVTKAEFRQREDFKK

SEQ ID NO: 338 - protein, 984 aa, Campylobacter jejuni
MARILAFDIGISSIGWAFSENDELKDCGVRIFTKAENPKTGESLALPRRLARSARKRLARRKARLNHLKHLIANEFKLNYEDYQSFDESLAKAYKGSLISPYELRFRALNELLSKQDFARVILHIAKRRGYDDIKNSDDKEKGAILKAIKQNEEKLANYQSVGEYLYKEYFQKFKENSKEFTNVRNKKESYERCIAQSFLKDELKLIFKKQREFGFSFSKKFEEEVLSVAFYKRALKDFSHLVGNCSFFTDEKRAPKNSPLAFMFVALTRIINLLNNLKNTEGILYTKDDLNALLNEVLKNGTLTYKQTKKLLGLSDDYEFKGEKGTYFIEFKKYKEFIKALGDHSLSQDDLNEIAKDITLIKDEIKLKKALAKYDLNQNQIDSLSKLEFKDHLNISFKALKLITPLMLEGKKYDEACNELNLKVAINEDKKDFLPAFNETYYKDEVTNPVVLRAIKEYRKVLNALLKKYGKVHKINIELAREVGKNYSQRAKIEKEQNENYKAKKDAELECEKLGLKINSKNILKLRLFKEQKEFCAYSGEKIKISDLQDEKMLEIDHIYPYSRSFDDSYMNKVLVFTKQNQEKLNQTPFEAFGNDSAKWQKIEVLAKNLPTKKQKRILDKNYKDKEQKNFKDRNLNDTRYIARLVLNYTKDYLDFLPLSDDENTKLNDTQKGSKVHVEAKSGMLTSALRHTWGFSAKDRNNHLHHTIDAVIIAYANNSIVKAFSDFKKEQESNSAELYAKKISELDYKNKRKFFEPFSGFRQKVLDKIDEIFVSKPERKKPSGALHEETFRKEEEFYQSYGGKEGVLKALELGKIRKVNGKIVKNGDMFRVDIFKHKKTNKFYAVPIYTMDFALKVLPNKAVARSKKGEIKDWILMDENYEFCFSLYKDSLILIQTKDMQEPEFVYYNAFTSSTVSLIVSKHDNKFETLSKNQKILFKNANEKEVIAKSIGIQNLKVFEKYIVSALGEVTKAEFRQREDFKK

SEQ ID NO: 339 - protein, 984 aa, Campylobacter jejuni
MARILAFDIGISSIGWAFSENDELKDCGVRIFTKAENPKTGESLALPRRLARSARKRLARRKARLNHLKHLIANEFKLNYEDYQSFDESLAKAYKGSLISPYELRFRALNELLSKQDFARVILHIAKRRGYDDIKNSDDKEKGAILKAIKQNEEKLANYQSVGEYLYKEYFQKFKENSKEFTNVRNKKESYERCIAQSFLKDELKLIFKKQREFGFSFSKKFEEEVLSVAFYKRALKDFSHLVGNCSFFTDEKRAPKNSPLAFMFVALTRIINLLNNLKNTEGILYTKDDLNTFLNEVLKNGTLTYKQTKKLLGLSDDYEFKGEKGTYFIEFKKYKEFIKALGDHNLSQDDLNEIAKDITLIKDEIKLKKALAKYDLNQNQIDSLSKLEFKDHLNISFKALKLITPLMLEGKKYDEACNELNLKVAINEDKKDFLPAFNETYYKDEVTNPVVLRAIKEYRKVLNALLKKYGKVHKINIELAREVGKNHSQRAKIEKEQNENYKAKKDAELECEKLGLKINSKNILKLRLFKEQKEFCAYSGEKIKISDLQDEKMLEIDHIYPYSRSFDDSYMNKVLVFTKQNQEKLNKTPFEAFGNDSAKWQKIEVLAKNLPTKKQKRILDKNYKDKEQKDFKDRNLNDTRYIARLVLNYTKDYLDFLPLSDDENTKLNDTQKGSKVHVEAKSGMLTSALRHTWGFSTKDRNNHLHHAIDAVIIAYANNSIVKAFSDFKKEQESNSAELYAKKISELDYKNKRKFFEPFSGFRQKVLDKIDEIFVSKPERKKPSGALHEETFRKEEEFYQSYGGKEGVLKALELGKIRKVNGKIVKNGDMFRVDIFKHKKTNKFYAVPIYTMDFALKVLPNKAVARSKKGEIKDWILMDENYEFCFSLYKDSLILIQTKDMQEPEFVYYNAFTSSTVSLIVSKHDNKFETLSKNQKILFKNANEKEVIAKSIGIQNLKVFEKYIVSALGEVTKAEFRQREDFKK

SEQ ID NO: 340 - protein, 987 aa, Campylobacter jejuni
MARILAFDIGISSIGWAFSENDELKDCGVRIFTKAENPKTGESLALPRRLARSARKRLARRKARLNHLKHLIANEFKLNYEDYQSFDESLAKAYKGSLISPYELRFRALNELLSKQDFARVILHIAKRRGYDDIKNSDDKEKGAILKAIKQNEEKLANYQSVGEYLYKEYFQKFKENSKEFTNVRNKKESYERCIAQSFLKDELKLIFKKQREFGFSFSKKFEEEVLSVAFYKRALKDFSHLVGNCSFFTDEKRAPKNSPLAFMFVALTRIINLLNNLKNTEGILYTKDDLNTLLNEVLKNGTLTYKQTKKLLGLSDDYEFKGEKGTYFIEFKKYKEFIKSLGDHSLSQDDLNEIAKDITLIKDEIKLKKALAKYDLNQNQIDSLSKLEFKDHLNISFKALKLITPLMLEGKKYDEACNELNLKVAINEDKKDFLPAFNETYYKDEVTNPVVLRAIKEYRKVLNALLKKYGKVHKINIELAREVGKNHSQRAKIEKEQNENYKAKKDAELECEKLGLKINSKNILKLRLFKEQKEFCAYSGEKIKISDLQDEKMLEIDHIYPYSRSFDDSYMNKVLVFTKQNQEKLNQTPFEAFGNDSAKWQKIEVLAKNLPTKKQKRILDKNYKDKEQKNFKDRNLNDTRYIARLVLNYTKDYLDFLPLSDDENTKLNDTQKGSKVHVEAKSGMLTSALRHTWGFSAKDRNNHLHHAIDAVIIAYANNSIVKAFSDFKKEQESNSAELYAKKISELDYKNKRKFFEPFSGFRQKVLDKIDEIFVSKPERKKPSGALHEETFRKEEEFYQSYGGKEGVLKALELGKIRKVNGKIVKNGDMFRVDIFKHKKTNKFYAVPIYTMDFALKVLPNKAVARSKKGEIKDWILMDENYEFCFSLYKDSLILIQTKDMQEPEFVYYNAFTSSTVSLIVSKHDNKFETLSKNQKILFKNANEKEVIAKSIGIQNLKVFEKYIVSALGEVTKAEFRQREDFKNELR

SEQ ID NO: 341 - protein, 987 aa, Campylobacter jejuni
MARILAFDIGISSIGWAFSENDELKDCGVRIFTKAENPKTGESLALPRRLARSARKRLARRKARLNHLKHLIANEFKLNYEDYQSFDESLAKAYKGSLISPYELRFRALNELLSKQDFARVILHIAKRRGYDDIKNSDDKEKGAILKAIKQNEEKLANYQSVGEYLYKEYFQKFKENSKEFTNVRNKKESYERCIAQSFLKDELKLIFKKQREFGFSFSKKFEEEVLSVAFYKRALKDFSHLVGNCSFFTDEKRAPKNSPLAFMFVALTRIINLLNNLKNTEGILYTKDDLNALLNEVLKNGTLTYKQTKKLLGLSDDYEFKGEKGTYFIEFKKYKEFIKALGDHSLSQDDLNEIAKDITLIKDEIKLKKALVKYDLNQNQIDSLSKLEFKDHLNISFKALKLITPLMLEGKKYDEACNELNLKVAINEDKKDFLPAFNETYYKDEVTNPVVLRAIKEYRKVLNALLKKYGKVHKINIELAREVGKNYSQRAKIEKEQNENYKAKKDAELECEKLGLKINSKNILKLRLFKEQKEFCAYSGEKIKISDLQDEKMLEIDHIYPYSRSFDDSYMNKVLVFTKQNQEKLNQTPFEAFGNDSAKWQKIEVLAKNLPTKKQKRILDKNYKDKEQKDFKDRNLNDTRYIARLVLNYTKDYLDFLPLSDDENTKLNDTQKGSKVHVEAKSGMLTSALRHTWGFSAKDRNNHLHHAIDAVIIAYANNSIVKAFSDFKKEQESNSAELYAKKISELDYKNKRKFFEPFSGFRQKVLDKIDEIFVSKPERKKPSGALHEETFRKEEEFYQSYGGKEGVLKALELGKIRKVNGKIVKNGDMFRVDIFKHKKTNKFYAVPIYTMDFALKVLPNKAVARSKKGEIKDWILMDENYEFCFSLYKDSLILIQTKDMQEPELVYFNAFTSSTVSLIVSKHDNKFETLSKNQKILFKNANEKEVIAKSIGIQNLKVFEKYIVSALGEVTKAEFRQREDFKNELR

SEQ ID NO: 342 - protein, 983 aa, Campylobacter jejuni; identical to SEQ ID NO: 231

SEQ ID NO: 343 - protein, 987 aa, Campylobacter jejuni
MARILAFDIGISSIGWAFSENDELKDCGVRIFTKAENPKTGESLALPRRLARSARKRLARRKARLNHLKHLIANEFKLNYEDYQSFDESLAKAYKGSLISPYELRFRALNELLSKQDFARVILHIAKRRGYDDIKNSDDKEKGAILKAIKQNEEKLVNYQSVGEYLYKEYFQKFKENSKEFTNVRNKKESYERCIAQSFLKDELKLIFKKQREFGFSFSKKFEEEVLSVAFYKRALKDFSHLVGNCSFFTDEKRAPKNSPLAFMFVALTRIINLLNNLKNTEGILYTKDDLNALLNEVLKNGTLTYKQTKKLLGLSDDYEFKGEKGTYFIEFKKYKEFIKALGDHSLSQDDLNEIAKDITLIKDEIKLKKALAKYDLNQNQIDSLSKLEFKDHLNISFKALKLITPLMLEGKKYDEACNELNLKVAINEDKKDFLPAFNETYYKDEVTNPVVLRAIKEYRKVLNALLKKYGKVHKINIELAREVGKNYSQRAKIEKEQNENYKAKKDAELECEKLGLKINSKNILKLRLFKEQKEFCAYSGEKIKISDLQDEKMLEIDHIYPYSRSFDDSYMNKVLVFTKQNQEKLNQTPFEAFGNDSAKWQKIEVLAKNLPTKKQKRILDKNYKDKEQKDFKDRNLNDTRYIARLVLNYTKDYLDFLPLSDDENTKLNDTQKGSKVHVEAKSGMLTSALRHTWGFSAKDRNNHLHHAIDAVIIAYANNSIVKAFSDFKKEQESNSAELYAKKISELDYKNKRKFFEPFSGFRQKVLDKIDEIFVSKPERKKPSGALHEETFRKEEEFYQSYGGKEGVLKALELGKIRKVNGKIVKNGDMFRVDIFKHKKTNKFYAVPIYTMDFALKVLPNKAVARSEKGEIKDWILMDENYEFCFSLYKDSLILIQTKDMQEPELVYFNAFTSSTVSLIVSKHDNKFETLSKNQKILFKNANEKEVIAKSIGIQNLKVFEKYIVSALGEVTKAEFRQREDFKNELR

SEQ ID NO: 344 - protein, 987 aa, Campylobacter jejuni
MARILAFDIGISSIGWAFSENDELKDCGVRIFTKAENPKTGESLALPRRLARSARKRLARRKARLNHLKHLIANEFKLNYEDYQSFDESLAKAYKGSLISPYELRFRALNELLSKQDFARVILHIAKRRGYDNIKNSDNEEKSEILKAIKQNEEKLVNYQSVGEYLYKEYFQKFKENSKEFINVRNKKESYERCIAQSFLKDELKLIFQKQREFGLSFSKKFEEEVLSVAFYKRALKDFSHLVGNCSFFTDEKRAPKNSPLAFMFVALTRIINLLNNLKNTEGILYTKDDLNTLLNEVLKNGTLTYKQTKKLLGLSDDYEFKGEKGTYFIEFKKYKEFIKALGDHSLSQDDLNEIAKDITLIKDEIKLKKALAKYDLNQNQIDSLSKLEFKDHLNISFKALKLITPLMLEGKKYDEACNELNLKVVINEDKKDFLPAFNETYYKDEVTNPVVLRAIKEYRKVLNALLKKYGKVHKINIELAREVGKNHSQRAKIEKEQNENYKAKKDAELECEKLGLKINNKNILKLRLFKEQKEFCAYSGEKIKLSDLQDEKMLEIDHIYPYSRSFDDSYMNKVLVFTKQNQEKLNKTPFEAFGNDSTKWQKIEVLAKNLPTKKQKRILDKNYKDKEQKDFKDRNLNDTRYIARLVLNYTKDYLDFLPLSDDENTKLNDIQKGSKVHVEAKSGMLTSALRHTWGFSTKDRNNHLHHAIDAVIIAYANNSIVKAFSDFKKEQESNSAELYAKKISELDYKNKRKFFEPFSGFRQKVLDKIDEIFVSKPERKKPSGALHEETFRKEEEFYQSYGGKEGVLKALELGKIRKVNGKIVKNGDMFRVDIFKHKKTNKFYAVPIYTMDFALKVLPNKAVVQGKDKKSGLIKDWILMDENYEFCFSLYKDSLILIQTKDMQEPEFVYYNAFTSSTVSLIVSKHDNKFETLSKNQKILFKNANEKEVIAKSIGIQNLKVFEKYIVSALGEVTKAEFRQREDFKK

SEQ ID NO: 345 - protein, 984 aa, Campylobacter jejuni
MARILAFDIGISSIGWAFSENDELKDCGVRIFTKAENPKTGESLALPRRLARSARKRLARRKARLNHLKHLIANEFKLNYEDYQSFDESLAKAYKGSLISPYELRFRALNELLSKQDFARVILHIVKRRGYDDIKNSDDKEKGAILKAIKQNEEKLANYQSVGEYLYKEYFQKFKENSKEFTNVRNKKESYERCIAQSFLKDELKLIFKKQREFGFSFSKKFEEEVLSVAFYKRALKDFSHLVGNCSFFTDEKRAPKNSPLAFMFVALTRIINLLNNLKNTEGILYTKDDLNTLLNEVLKNGTLTYKQTKKLLGLSDDYEFKGEKGTYFIEFKKYKEFIKALGDHSLSQDDLNEIAKDITLIKDEIKLKKALAKYDLNQNQIDSLSKLEFKDHLNISFKALKLITPLMLEGKKYDEACNELNLKVAINEDKKDFLPAFNETYYKDEVTNPVVLRAIKEYRKVLNALLKKYGKVHKINIELAREVGKNHSQRAKIEKEQNENYKAKKDAEFECEKLGLKINSKNILKLRLFKEQKEFCAYSGEKIKISDLQDEKMLEIDHIYPYSRSFDDSYMNKVLVFTKQNQEKLNKTPFEAFGNDSAKWQKIEVLAKNLPTKKQKRILDKNYKDKEQKDFKDRNLNDTRYIARLVLNYTKDYLDFLPLSDDENTKLNDTQKGSKVHVEAKSGMLTSALRHTWGFSTKDRNNHLHHAIDAVIIAYANNSIVKAFSDFKKEQESNSAELYAKKISELDYKNKRKFFEPFSGFRQKVLDKIDEIFVSKPERKKPSGALHEETFRKEEEFYQSYGGKEGVLKALELGKIRKVNGKIVKNGDMFRVDIFKHKKTNKFYAVPIYTMDFALKVLPNKAVARSKKGEIKDWILMDENYEFCFSLYKDSLILIQTKDMQEPEFVYYNAFTSSTVSLIVSKHDNKFETLSKNQKILFKNANEKEVIAKSIGIQNLKVFEKYIVSALGEVTKAEFRQREDFKK

SEQ ID NO: 346 - protein, 984 aa, Campylobacter jejuni
MARILAFDIGISSIGWAFSENDELKDCGVRIFTKAENPKTGESLALPRRLARSARKRLARRKARLNHLKHLIANEFKLNYEDYQSFDESLAKAYKGSLISPYELRFRALNELLSKQDFARVILHIVKRRGYDDIKNSDDKEKGTILKAIKQNEEKLANYQSVGEYLYKEYFQKFKENSKEFTNVRNKKESYERCIAQSFLKDELKLIFKKQREFGFSFSKKFEEEVLSVAFYKRALKDFSHLVGNCSFFTDEKRAPKNSPLAFMFVALTRIINLLNNLKNTEGILYTKDDLNTLLNEVLKNGTLTYKQTKKLLGLSDDYEFKGEKGTYFIEFKKYKEFIKALGEHNLSQDDLNEIAKDITLIKDEIKLKKALAKYDLNQNQIDSLSKLEFKDHLNISFKALKLITPLMLEGKKYDEACNELNLKVAINEDKKDFLPAFNETYYKDEVTNPVVLRAIKEYRKVLNALLKKYGKVHKINIELAREVGKNYSQRAKIEKEQNENYKAKKDAELECEKLGLKINSKNILKLRLFKEQKEFCAYSGEKIKISDLQDEKMLEIDHIYPYSRSFDDSYMNKVLVFTKQNQEKLNQTPFEAFGNDSAKWQKIEVLAKNLPTKKQKRILDKNYKDKEQKDFKDRNLNDTRYIARLVLNYTKDYLDFLPLSDDENTKLNDTQKGSKVHVEAKSGMLTSALRHTWGFSAKDRNNHLHHAIDAVIIAYANNSIVKAFSDFKKEQESNSAELYAKKISELDYKNKRKFFEPFSGFRQKVLDKIDEIFVSKPERKKPSGALHEETFRKEEEFYQSYGGKEGVLKALELGKIRKVNGKIVKNGDMFRVDIFKHKKTNKFYAVPIYTMDFALKVLPNKAVARSKKGEIKDWILMDENYEFCFSLYKDSLILIQTKDMQEPEFVYYNAFTSSTVSLIVSKHDNKFETLSKNQKILFKNANEKEVIAKSIGIQNLKVFEKYIVSALGEVTKAEFRQREDFKK

SEQ ID NO: 347 - protein, 987 aa, Campylobacter jejuni
MARILAFDIGISSIGWAFSENDELKDCGVRIFTKAENPKTGESLALPRRLARSARKRLARRKARLNHLKHLIANEFKLNYEDYQSFNESLAKAYKGSLISPYELRFRALNELLSKQDFARVILHIAKRRGYDDIKNSDDKEKGAILKVIKQNEEKLANYQSVGEYLYKEYFQKFKENSKEFTNVRNKKESYERCIAQSFLKDELKLIFQKQREFGFSFSKKFEEEVLSVAFYKRALKDFSHLVGNCSFFTDEKRAPKNSPLAFMFVALTRIINLLNNLKNTEGILYTKDDLNALLNEVLKNGTLTYKQTKKLLGLSDDYEFKGEKGTYFIEFKKYKEFIKALGDHSLSQDDLNEIAKDITLIKDEIKLKKALAKYDLNQNQIDSLSKLEFKDHLNISFKALKLITPLMLEGKKYDEACNELNLKVAINEDKKDFLPAFNETYYKDEVTNPVVLRAIKEYRKVLNALLKKYGKVHKINIELAREVGKNYSQRAKIEKEQNENYKAKKDAELECEKLGLKINSKNILKLRLFKEQKEFCAYSGEKIKISDLQDEKMLEIDHIYPYSRSFDDSYMNKVLVFTKQNQEKLNQTPFEAFGNDSAKWQKIEVLAKNLPTKKQKRILDKNYKDKEQKDFKDRNLNDTRYIARLVLNYTKDYLDFLPLSDDENTKLNDTQKGSKVHVEAKSGMLTSALRHTWGFSAKDRNNHLHHAIDAVIIAYANNSIVKAFSDFKKEQESNSAELYAKKISELDYKNKRKFFEPFSGFRQKVLDKIDEIFVSKPERKKPSGALHEETFRKEEEFYQSYGGKEGVLKALELGKIRKVNGKIVKNGDMFRVDIFKHKKTNKFYAVPIYTMDFALKVLPNKAVARSKKGEIKDWILMDENYEFCFSLYKDSLILIQTKDMQEPELVYFNAFTSSTVSLIVSKHDNKFETLSKNQKILFKNANEKEVIAKSIGIQNLKVFEKYIVSALGEVTKAEFRQREDFKNELR

SEQ ID NO: 348 - protein, 984 aa, Campylobacter jejuni
MARILAFDIGISSIGWAFSENDELKDCGVRIFTKAENPKTGESLALPRRLARSARKRLARRKARLNRLKHLIANEFKLNYEDYQSFDESLAKAYKGSLISPYELRFRALNELLSKQDFARVILHIAKRRGYDDIKNSDDKEKGAILKAIKQNEEKLANYQSVGEYLYKEYFQKFKENSKEFTNVRNKKESYERCIAQSFLKDELKLIFKKQREFGFSFSKKFEEEVLSVAFYKRALKDFSHLVGNCSFFTDEKRAPKNSPLAFMFVALTRIINLLNNLKNTEGILYTKDDLNALLNEVLKNGTLTYKQTKKLLGLSDDYEFKGEKGTYFIEFKKYKEFIKALGDHSLNQDDLNEIAKDITLIKDEIKLKKALAKYDLNQNQIDSLSKLEFKDHLNISFKALKLITPLMLEGKKYDEACNELNLKVAINEDKKDFLPAFNETYYKDEVTNPVVLRAIKEYRKVLNALLKKYGKVHKINIELAREVGKNYSQRAKIEKEQNENYKAKKDAELECEKLGLKINSKNILKLRLFKEQKEFCVYSGEKIKISDLQDEKMLEIDHIYPYSRSFDDSYMNKVLVFTKQNQEKLNQTPFEAFGNDSAKWQKIEVLAKNLPTKKQKRILDKNYKDKEQKDFKDRNLNDTRYIARLVLNYTKDYLDFLPLSDDENTKLNDTQKGSKVYVEAKSGMLTSALRHTWGFSTKDRNNHLHHAIDAVIIAYANNSIVKAFSDFKKEQESNSAELYAKKISELDYKNKRKFFEPFSGFRQKVLDKIDEIFVSKPERKKPSGALHEETFRKEEEFYQSYGGKEGVLKALELGKIRKVNGKIVKNGDMFRVDIFKHKKTNKFYAVPIYTMDFALKVLPNKAVARSKKGEIKDWILMDENYEFCFSLYKDSLILIQTKDMQEPEFVYYNAFTSSTVSLIVSKHDNKFETLSKNQKILFKNANEKEVIAKSIGIQNLKVFEKYIVSALGEVTKAEFRQREDFKK

SEQ ID NO: 349 - protein, 984 aa, Campylobacter jejuni
MARILAFDIGISSIGWAFSENDELKDCGVRIFTKVENPKTGESLALPRRLARSARKRLARRKARLNHLKHLIANEFKLNYEDYQSFDESLAKAYKGSLISPYELRFRALNELLSKQDFARVILHIAKRRGYDDIKNSDDKEKGAILKAIKQNEEKLANYQSVGEYLYKEYFQKFKENSKEFTNVRNKKESYERCIAQSFLKDELKLIFKKQREFGFSFLKKFEEEVLSVAFYKRALKDFSHLVGNCSFFTDEKRAPKNSPLAFMFVALTRIINLLNNLKNTEGILYTKDDLNALLNEVLKNGTLTYKQTKKLLGLSDDYEFKGEKGTYFIEFKKYKEFIKALGEHNLSQDDLNEIAKDITLIKDEIKLKKALAKYDLNQNQIDSLSKLEFKDHLNISFKALKLITPLMLEGKKYDEAYNELNLKVAINEDKKDFLPAFNETYYKDEVTNPVVLRAIKEYRKVLNALLKKYGKVHKINIELAREVGKNHSQRAKIEKEQNENYKAKKDAELECEKLGLKINSKNILKLRLFKEQKEFCAYSGEKIKISDLQDEKMLEIDHIYPYSRSFDDSYMNKVLVFTKQNQEKLNQTPFEAFGNDSAKWQKIEVLAKNLPTKKQKRILDKNYKDKEQKDFKDRNLNDTRYIARLVLNYTKDYLDFLPLSDDENTKLNDTQKGSKVHVEAKSGMLTSALRHTWGFSAKDRNNHLHHAIDAVIIAYANNSIVKAFSDFKKEQESNSAELYAKKISELDYKNKRKFFEPFSGFRQKVLDKIDEIFVSKPERKKPSGALHEETFRKEEEFYQSYGGKEGVLKALELGKIRKVNGKIVKNGDMFRVDIFKHKKTNKFYAVPIYTMDFALKVLPNKAVARSKKGEIKDWILMDENYEFCFSLYKDSLILIQTKDMQEPELVYFNAFTSSTVSLIVSKHDNKFETLSKNQKILFKNANEKEVIAKSIGIQNLKVFEKYIVSALGEVTKAEFRQREDFKK

SEQ ID NO: 350 - protein, 984 aa, Campylobacter jejuni
MARILAFDIGISSIGWAFSENDELKDCGVRIFTKVENPKTGESLALPRRLARSARKRLARRKARLNHLKHLIANEFKLNYEDYQSFDESLAKAYKGSLISPYELRFRALNELLSKQDFARVILHIAKRRGYDDIKNSDDKEKGAILKAIKQNEEKLANYQSVGEYLYKEYFQKFKENSKEFTNVRNKKESYERCIAQSFLKDELKLIFKKQREFGFSFSKKFEEEVLSVAFYKRALKDFSHLVGNCSFFTDEKRAPKNSPLAFMFVALTRIINLLNNLKNTEGILYTKDDLNALLNEVLKNGTLTYKQTKKLLGLSDDYEFKGEKGTYFIEFKKYKEFIKALGEHNLSQDDLNEIAKDITLIKDEIKLKKALAKYDLNQNQIDSLSKLEFKDHLNISFKALKLITPLMLEGKKYDEACNELNLKVAINEDKKDFLPAFNETYYKDEVTNPVVLRAIKEYRKVLNALLKKYGKVHKINIELAREVGKNHSQRAKIEKEQNENYKAKKDAELECEKLGLKINSKNILKLRLFKEQKEFCAYSGEKIKISDLQDEKMLEIDHIYPYSRSFDDSYMNKVLVFTKQNQEKLNKTPFEAFGNDSAKWQKIEVLAKNLPTKKQKRILDKNYKDKEQKDFKDRNLNDTRYIARLVLNYTKDYLDFLPLSNDENTKLNDTQKGSKVHVEAKSGMLTSALRHTWGFSTKDRNNHLHHAIDAVIIAYANNSIVKAFSDFKKEQESNSAELYAKKISELDYKNKRKFFEPFSGFRQKVLDKIDEIFVSKPERKKPSGALHEETFRKEEEFYQSYGGKEGVLKALELGKIRKVNGKIVKNGDMFRVDIFKHKKTNKFYAVPIYTMDFALKVLPNKAVARSKKGEIKDWILMDENYEFCFSLYKDSLILIQTKDMQEPEFVYYNAFTSSTVSLIVSKHDNKFETLSKNQKILFKNANEKEVIAKSIGIQNLKVFEKYIVSALGEVTKAEFRQREDFKK

SEQ ID NO: 351 - protein, 984 aa, Campylobacter jejuni
MARILAFDIGISSIGWAFSENDELKDCGVRIFTKVENPKTGESLALPRRLARSARKRLARRKARLNHLKHLIANEFKLNYEDYQSFDESLAKAYKGSLISPYELRFRALNELLSKQDFARVILHIAKRRGYDDIKNSDDKEKGAILKAIKQNEEKLANYQSVGEYLYKEYFQKFKENSKEFTNVRNKKESYERCIAQSFLKDELKLIFKKQREFGFSFSKKFEEEVLSVAFYKRALKDFSHLVGNCSFFTDEKRAPKNSPLAFMFVALTRIINLLNNLKNTEGILYTKDDLNALLNEVLKNGTLTYKQTKKLLGLSDDYEFKGEKGTYFIEFKKYKEFIKALGEHNLSQDDLNEIAKDITLIKDEIKLKKALAKYDLNQNQIDSLSKLEFKDHLNISFKALKLITPLMLEGKKYDEACNELNLKVAINEDKKDFLPAFNETYYKDEVTNPVVLRAIKEYRKVLNALLKKYGKVHKINIELAREVGKNHSQRAKIEKEQNENYKAKKDAELECEKLGLKINSKNILKLRLFKEQKEFCAYSGEKIKISDLQDEKMLEIDHIYPYSRSFDDSYMNKVLVFTKQNQEKLNKTPFEAFGNDSAKWQKIEVLAKNLPTKKQKRILDKNYKDKEQKDFKDRNLNDTRYIARLVLNYTKDYLDFLPLSDDENTKLNDTQKGSKVHVEAKSGMLTSALRHTWGFSTKDRNNHLHHAIDAVIIAYANNSIVKAFSDFKKEQESNSAELYAKKISELDYKNKRKFFEPFSGFRQKVLDKIDEIFVSKPERKKPSGALHEETFRKEEEFYQSYGGKEGVLKALELGKIRKVNGKIVKNGDMFRVDIFKHKKTNKFYAVPIYTMDFALKVLPNKAVARSKKGEIKDWILMDENYEFCFSLYKDSLILIQTKDMQEPEFVYYNAFTSSTVSLIVSKHDNKFETLSKNQKILFKNANEKEVIAKSIGIQNLKVFEKYIVSALGEVTKAEFRQREDFKK

SEQ ID NO: 352 - protein, 984 aa, Campylobacter jejuni
MARILAFDIGISSIGWAFSENDELKDCGVRIFTKVENPKTGESLALPRRLARSARKRLARRKARLNHLKHLIANEFKLNYEDYQSFDESLAKAYKGSLISPYELRFRALNELLSKQDFARVILHIAKRRGYDDIKNSDDKEKGAILKAIKQNEEKLANYQSVGEYLYKEYFQKFKENSKEFTNVRNKKESYERCIAQSFLKDELKLIFKKQREFGFSFSKKFEEEVLSVAFYKRALKDFSHLVGNCSFFTDEKRAPKNSPLAFMFVTLTRIINLLNNLKNTEGILYTKDDLNALLNEVLKNGTLTYKQTKKLLGLSDDYEFKGEKGTYFIEFKKYKEFIKALGEHNLSQDDLNEIAKDITLIKDEIKLKKALAKYDLNQNQIDSLSKLEFKDHLNISFKALKLITPLMLEGKKYDEACNELNLKVAINEDKKDFLPAFNETYYKDEVTNPVVLRAIKEYRKVLNALLKKYGKVHKINIELAREVGKNHSQRAKIEKEQNENYKAKKDAELECEKLGLKINSKNILKLRLFKEQKEFCAYSGEKIKISDLQDEKMLEIDHIYPYSRSFDDSYMNKVLVFTKQNQEKLNKTPFEAFGNDSAKWQKIEVLAKNLPTKKQKRILDKNYKDKEQKDFKDRNLNDTRYIARLVLNYTKDYLDFLPLSDDENTKLNDTQKGSKVHVEAKSGMLTSALRHTWGFSTKDRNNHLHHAIDAVIIAYANNSIVKAFSDFKKEQESNSAELYAKKISELDYKNKRKFFEPFSGFRQKVLDKIDEIFVSKPERKKPSGALHEETFRKEEEFYQSYGGKEGVLKALELGKIRKVNGKIVKNGDMFRVDIFKHKKTNKFYAVPIYTMDFALKVLPNKAVARSKKGEIKDWILMDENYEFCFSLYKDSLILIQTKDMQEPEFVYYNAFTSSTVSLIVSKHDNKFETLSKNQKILFKNANEKEVIAKSIGIQNLKVFEKYIVSALGEVTKAEFRQREDFKK

SEQ ID NO: 353 - protein, 984 aa, Campylobacter jejuni
MARILAFDIGISSIGWAFSENDELKDCGVRIFTKVENPKTGESLALPRRLARSARKRLARRKARLNHLKHLIANEFKLNYEDYQSFDESLAKAYKGSLISPYELRFRALNELLSKQDFARVILHIAKRRGYDDIKNSDDKEKGAILKAIKQNEEKLANYQSVGEYLYKEYFQKFKENSKEFTNVRNKKESYERCIAQSFLKDELKLIFKKQREFGFSFSKKFEEEVLSVAFYKRALKDFSHLVGNCSFFTDEKRAPKNSPLAFMFVALTRIINLLNNLKNTEGILYTKDDLNALLNEVLKNGTLTYKQTKKLLGLSDDYEFKGEKGTYFIEFKKYKEFIKALGEHNLSQDDLNEIAKDITLIKDEIKLKKALAKYDLNQNQIDSLSKLEFKDHLNISFKALKLITPLMLEGKKYDEACNELNLKVAINEDKKDFLPAFNETYYKDEVTNPVVLRAIKEYRKVLNALLKKYGKVHKINIELAREVGKNHSQRAKIEKEQNENYKAKKDAELECEKLGLKINSKNILKLRLFKEQKEFCAYSGEKIKISDLQDEKMLEIDHIYPYSRSFDDSYMNKVLVFTKQNQEKLNKTPFEAFGNDSAKWQKIEVLAKNLPTKKQKRILDKNYKDKEQKDFKDRNLNDTRYIARLVLNYTKDYLDFLPLSDDENTKLNDTQKGSKVHVEAKSGMLTSALRHTWGFSTKDRNNHLHHAIDAVIIAYANNSIVKAFSDFKKEQESNSAELYAKKISELDYKNKRKFFEPFSGFRQKVLDKIDEIFVSKPERKKPSGALHEETFRKEEEFYQSYGGKEGVLKALELGKIRKVNGKIVKNGDMFRVDIFKHKKTNKFYAVPIYTMDFALKVLPNKAVARSKKGEIKDWILMDENYEFCFSLYKDSLILIQTKDMQEPEFVYYNAFTSSTVSLIVSKHDNKFETLSKNQKILFKNANEKEVIAKSIGIQNLKVFEKYIVSALGEVTKAEFIQREDFKK

SEQ ID NO: 354 - protein, 987 aa, Campylobacter jejuni
MARILAFDIGISSIGWAFSENDELKDCGVRIFTKVENPKTGESLALPRRLARSARKRLARRKARLNHLKHLIANEFKLNYEDYQSFDESLAKAYKGSLISPYELRFRALNELLSKQDFARVILHIAKRRGYDDIKNSDDKEKGAILKAIKQNEEKLANYQSVGEYLYKEYFQKFKENSKEFTNVRNKKESYERCIAQSFLKDELKLIFKKQREFGFSFSKKFEEEVLSVAFYKRALKDFSHLVGNCSFFTDEKRVPKNSPLAFMFVALTRIINLLNNLKNTEGILYTKDDLNALLNEVLKNGTLTYKQTKKLLGLSDDYEFKGEKGTYFIEFKKYKEFIKALGEHNLSQDDLNEIAKDITLIKDEIKLKKALAKYDLNQNQIDSLSKLEFKDHLNISFKALKLITPLMLEGKKYDEACNELNLKVAINEDKKDFLPAFNETYYKDEVTNPVVLRAIKEYRKVLNALLKKYGKVHKINIELAREVGKNHSQRAKIEKEQNENYKAKKDAELECEKLGLKINSKNILKLRLFKEQKEFCAYSGEKIKISDLQDEKMLEIDHIYPYSRSFDDSYMNKVLVFTKQNQEKLNQTPFEAFGNDSAKWQKIEVLAKNLPTKKQKRILDKNYKDKEQKNFKDRNLNDTRYIARLVLNYTKDYLDFLPLSDDENTKLNDTQKGSKVHVEAKSGMLTSALRHTWGFSAKDRNNHLHHAIDAVIIAYANNSIVKAFSDFKKEQESNSAELYAKKISELDYKNKRKFFEPFSGFRQKVLDKIDEIFVSKPERKKPSGALHEETFRKEEEFYQSYGGKEGVLKALELGKIRKVNGKIVKNGDMFRVDIFKHKKTNKFYGVPIYTMDFALKVLPNKAVARSKKGEIKDWILMDENYEFCFSLYKDSLILIQTKDMQEPEFVYYNAFTSSTVSLIVSKHDNKFETLSKNQKILFKNANEKEVIAKSIGIQNLKVFEKYIVSALGEVTKAEFRQREDFKNELR

SEQ ID NO: 355 - protein, 984 aa, Campylobacter jejuni
MARILAFDIGISSIGWAFSENDELKDCGVRIFTKVENPKTGESLALPRRLARSARKRLARRKVRLNHLKHLIANEFKLNYEDYQSFDESLAKAYKGSLISPYELRFRALNELLSKQDFARVILHIAKRRGYDDIKNSDDKEKGAILKAIKQNEEKLANYQSVGEYLYKEYFQKFKENSKEFTNVRNKKESYERCIAQSFLKDELKLIFKKQREFGFSFSKKFEEEVLSVAFYKRALKDFSHLVGNCSFFTDEKRAPKNSPLAFMFVALTRIINLLNNLKNTEGILYTKDDLNALLNEVLKNGTLTYKQTKKLLGLSDDYEFKGEKGTYFIEFKKYKEFIKALGEHNLSQDDLNEIAKDITLIKDEIKLKKALAKYDLNQNQIDSLSKLEFKDHLNISFKALKLITPLMLEGKKYDEACNELNLKVAINEDKKDFLPAFNETYYKDEVTNPVVLRAIKEYRKVLNALLKKYGKVHKINIELAREVGKNHSQRAKIEKEQNENYKAKKDAELECEKLGLKINSKNILKLRLFKEQKEFCAYSGEKIKISDLQDEKMLEIDHIYPYSRSFDDSYMNKVLVFTKQNQEKLNKTPFEAFGNDSAKWQKIEVLAKNLPTKKQKRILDKNYKDKEQKDFKDRNLNDTRYIARLVLNYTKDYLDFLPLSDDENTKLNDTQKGSKVHVEAKSGMLTSALRHTWGFSTKDRNNHLHHAIDAVIIAYANNSIVKAFSDFKKEQESNSAELYAKKISELDYKNKRKFFEPFSGFRQKVLDKIDEIFVSKPERKKPSGALHEETFRKEEEFYQSYGGKEGVLKALELGKIRKVNGKIVKNGDMFRVDIFKHKKTNKFYAVPIYTMDFALKVLPNKAVARSKKGEIKDWILMDENYEFCFSLYKDSLILIQTKDMQEPEFVYYNAFTSSTVSLIVSKHDNKFETLSKNQKILFKNANEKEVIAKSIGIQNLKVFEKYIVSALGEVTKAEFRQREDFKK

SEQ ID NO: 356 - protein, 721 aa, Campylobacter jejuni
MFVALTRIINLLNNLKNTEGILYTKDDLNTLLNEVLKNGTLTYKQTKKLLGLSDDYEFKGEKGTYFIEFKKYKEFIKALGDHSLSQDDLNEIAKDITLIKDEIKLKKALAKYDLNQNQIDSLSKLEFKDHLNISFKALKLITPLMLEGKKYDEACNELNLKVAINEDKKDFLPAFNETYYKDEVTNPVVLRAIKEYRKVLNALLKKYGKVHKINIELAREVGKNYSQRAKIEKEQNENYKAKKDAELECEKLGLKINSKNILKLRLFKEQKEFCAYSGEKIKISDLQDEKMLEIDHIYPYSRSFDDSYMNKVLVFTKQNQEKLNQTPFEAFGNDSAKWQKIEVLAKNLPTKKQKRILDKNYKDKEQKDFKDRNLNDTRYIARLVLNYTKDYLDFLPLSDDENTKLNNTQKGSKVYVEAKSGMLTSALRHTWGFSTKDRNNHLHHAIDAVIIAYANNSIVKAFSDFKKEQESNSAELYAKKISELDYKNKRKFFEPFSGFRQKVLDKIDEIFVSKPERKKPSGALHEETFRKEEEFYQSYGGKEGVLKALELGKIRKVNGKIVKNGDMFRVDIFKHKKTNKFYAVPIYTMDFALKVLPNKAVARSKKGEIKDWILMDENYEFCFSLYKDSLILIQTKDMQEPEFVYYNAFTSSTVSLIVSKHDNKFETLSKNQKILFKNANEKEVIAKSIGIQNLKVFEKYIVSALGEVTKAEFRQREDFKK

SEQ ID NO: 357 - protein, 512 aa, Campylobacter jejuni
MHKINIELAREVGKNHSQRAKIEKEQNENYKAKKDAEIECEKLGLKINSKNILKLRLFKEQKEFCAYSGEKIKLSDLQDEKMLEIDHIYPYSRSFDDSYMNKVLVFTKQNQEKLNKTPFEAFGNDSTKWQKIEVLAKNLPEKKQKRILDKNYKDKEQKDFKDRNLNDTRYIARLVLNYTKDYLDFLPLSDDENTKLNDTQKGSKVHVEAKSGMLTSALRHTWGFSAKDRNNHLHHAIDAAIIAYANNSIVKAFSDFKKEQESNSVELYAKKISELDYKNKRKFFEPFSGFRQKVLDKIDEIFVSKPERKKPSGALHEETFRKEEEFYQSYGGKEGVLKALELGKIRKVNGKIVKNGDMFRVDIFKHKKTNKFYAVPIYTMDFALKVLPNKAVARSKKGEIKDWILMDENYEFCFSLYKDSLILIQTKDMQEPELVYFNAFTSSTVSLIVSKHDNKFETLSKNQKILFKNANEKEVIAKSIGIQNLKVFEKYIVSALGEVTKAEFRQREDFKK

SEQ ID NO: 358 - protein, 965 aa, Campylobacter jejuni
MKIIGFNLGIANIGWALRENDEIIDCGVRVFDIPENPKNGNSLALERRENKARMKIVKRKKARMLATKTFLKKELNVDLSKLFLIGSTQSIYELRAKALSSLISKEELSAIILHIAKHRGYDDSALKNENGTIIEALNKNKETMLKFKSVGEYFYKNFVQNKEVKKIRNTTEDYSNSVPRSLLKQELDLILDKQKELGLIKNADFKEKLFEIIFFKRPLKDFSNKIGNCIFFENEKRAAKNTISACEFVALGKVVNLLKSIEKDIGIVYEKDSINEIMSIILDKTSISYKKIRDILNLPQEINFKGLDYSKNNVENSKLVDLKKLNEFKKALGDGFANLDKDILDSIATDITLTKDTATLKEKLKNYNVLNAEQIEKLSELVFNDHINLSLKALKQIIPLMYEGKRYDEACELCNFTIAKNQEKSEYLPLFEKTRFAKDISSPVVIRAICEFRKLLNDIIRRYGSVHKIHLELTRDFGISFSDRKKIIKEIEQNEQSRIKALETIKELKLEETSKNIQIVRLFEDQKGICPYSGLKMDLNRLDELVIDYIRPYNRSLDDSYSNKVLTFKKLSDLKQGKTPFEAFGEDEKLWAEINERIKEYNGKKRFKIFDKFFKDKKPFDFTEQTLQDTRWLTKLVASYLNEYLSFLPISEDENTALGYGEKGSKQHVILSSGMITQMLRNFWYLGFKNHKDYKNNAMDAIIVAFTTNSIIFAFNNFKKELDLAKAEFYANKISESDYLLKRKFLPPFSGFKEQALEKVKNIFVSHSLKIKNKGTLHDLTPLKIKELKNTYGDLDLAVKLGKIRKYNDKYYANANGSLVRADLFVDKKNKFHAVSIYKADFSTKKLPNKTPATTSNGETKEGIEMNENYNFCMSLYKNTPISVKIKGMKEPIICYYHGFNTSGSKITYKKHDNNYHNLSEDEMVVFRKNDKESIAVGKILEIKKYSISPSGELSLIENEERKWF

SEQ ID NO: 359 - protein, 759 aa, Campylobacter jejuni
MLSVAFYKRALKDFSHLVGNCSFFTDEKRAPKNSPLAFMFVALTRIINLLNNLKNTEGILYTKDDLNALLNEVLKNGTLTYKQTKKLLGLSDDYEFKGEKGTYFIEFKKYKEFIKALGEHNLSQDDLNEIAKDITLIKDEIKLKKALAKYDLNQNQIDSLSKLEFKDHLNISFKALKLITPLMLEGKKYDEACNELNLKVAINEDKKDFLPAFNETYYKDEVTNPVVLRAIKEYRKVLNALLKKYGKVHKINIELAREVGKNHSQRAKIEKEQNENYKAKKDAELECEKLGLKINSKNILKLRLFKEQKEFCAYSGEKIKISDLQDEKMLEIDHIYPYSRSFDDSYMNKVLVFTKQNQEKLNKTPFEAFGNDSAKWQKIEVLAKNLPTKKQKRILDKNYKDKEQKDFKDRNLNDTRYIARLVLNYTKDYLDFLPLSDDENTKLNDTQKGSKVHVEAKSGMLTSALRHTWGFSTKDRNNHLHHAIDAVIIAYANNSIVKAFSDFKKEQESNSAELYAKKISELDYKNKRKFFESFSGFRQKVLDKIDEIFVSKPERKKPSGALHEETFRKEEEFYQSYGGKEGVLKALELGKIRKVNGKIVKNGDMFRVDIFKHKKTNKFYAVPIYTMDFALKVLPNKAVARSKKGEIKDWILMDENYEFCFSLYKDSLILIQTKDMQEPEFVYYNAFTSSTVSLIVSKHDNKFETLSKNQKILFKNANEKEVIAKSIGIQNLKVFEKYIVSALGEVTKAEFRQREDFKK

SEQ ID NO: 360 - protein, 984 aa, Campylobacter jejuni
MVRILAFDIGISSIGWAFSENDELKDCGVRIFTKVENPKTGESLALPRRLARSARKRLARRKARLNHLKHLIANEFKLNYEDYQSFDESLAKAYKGSLISPYELRFRALNELLSKQDFARVILHIAKRRGYDDIKNSDDKEKGAILKAIKQNEEKLANYQSVGEYLYKEYFQKFKENSKEFTNVRNKKESYERCIAQSFLKDELKLIFKKQREFGFSFSKKFEEEVLSVAFYKRALKDFSHLVGNCSFFTDEKRAPKNSPLAFMFVALTRIINLLNNLKNTEGILYTKDDLNALLNEVLKNGTLTYKQTKKLLGLSDDYEFKGEKGTYFIEFKKYKEFIKALGEHNLSQDDLNEIAKDITLIKDEIKLKKALAKYDLNQNQIDSLSKLEFKDHLNISFKALKLITPLMLEGKKYDEACNELNLKVAINEDKKDFLPAFNETYYKDEVTNPVVLRAIKEYRKVLNALLKKYGKVHKINIELAREVGKNHSQRAKIEKEQNENYKAKKDAELECEKLGLKINSKNILKLRLFKEQKEFCAYSGEKIKISDLQDEKMLEIDHIYPYSRSFDDSYMNKVLVFTKQNQEKLNKTPFEAFGNDSAKWQKIEVLAKNLPTKKQKRILDKNYKDKEQKDFKDRNLNDTRYIARLVLNYTKDYLDFLPLSDDENTKLNDTQKGSKVHVEAKSGMLTSALRHTWGFSTKDRNNHLHHAIDAVIIAYANNSIVKAFSDFKKEQESNSAELYAKKISELDYKNKRKFFEPFSGFRQKVLDKIDEIFVSKPERKKPSGALHEETFRKEEEFYQSYGGKEGVLKALELGKIRKVNGKIVKNGDMFRVDIFKHKKTNKFYAVPIYTMDFALKVLPNKAVARSKKGEIKDWILMDENYEFCFSLYKDSLILIQTKDMQEPEFVYYNAFTSSTVSLIVSKHDNKFETLSKNQKILFKNANEKEVIAKSIGIQNLKVFEKYIVSALGEVTKAEFRQREDFKK

SEQ ID NO: 361 - protein, 1003 aa, Campylobacter lari]
MRILGFDIGINSIGWAFVENDELKDCGVRIFTKAENPKNKESLALPRRNARSSRRRLKRRKARLIAIKRILAKELKLNYKDYVAADGELPKAYEGSLASVYELRYKALTQNLETKDLARVILHIAKHRGYMNKNEKKSNDAKKGKILSALKNNALKLENYQSVGEYFYKEFFQKYKKNTKNFIKIRNTKDNYNNCVLSSDLEKELKLILEKQKEFGYNYSEDFINEILKVAFFQRPLKDFSHLVGACTFFEEEKRACKNSYSAWEFVALTKIINEIKSLEKISGEIVPTQTINEVLNLILDKGSITYKKFRSCINLHESISFKSLKYDKENAENAKLIDFRKLVEFKKALGVHSLSRQELDQISTHITLIKDNVKLKTVLEKYNLSNEQINNLLEIEFNDYINLSFKALGMILPLMREGKRYDEACEIANLKPKTVDEKKDFLPAFCDSIFAHELSNPVVNRAISEYRKVLNALLKKYGKVHKIHLELARDVGLSKKAREKIEKEQKENQAVNAWALKECENIGLKASAKNILKLKLWKEQKEICIYSGNKISIEHLKDEKALEVDHIYPYSRSFDDSFINKVLVFTKENQEKLNKTPFEAFGKNIEKWSKIQTLAQNLPYKKKNKILDENFKDKQQEDFISRNLNDTRYIATLIAKYTKEYLNFLLLSENENANLKSGEKGSKIHVQTISGMLTSVLRHTWGFDKKDRNNHLHHALDAIIVAYSTNSIIKAFSDFRKNQELLKARFYAKELTSDNYKHQVKFFEPFKSFREKILSKIDEIFVSKPPRKRARRALHKDTFHSENKIIDKCSYNSKEGLQIALSCGRVRKIGTKYVENDTIVRVDIFKKQNKFYAIPIYAMDFALGILPNKIVITGKDKNNNPKQWQTIDESYEFCFSLYKNDLILLQKKNMQEPEFAYYNDFSISTSSICVEKHDNKFENLTSNQKLLFSNAKEGSVKVESLGIQNLKVFEKYIITPLGDKIKADFQPRENISLKTSKKYGLR

SEQ ID NO: 362 - protein, 372 aa, candidate division
DNESAINQIAYILTTQKADEGIRAELDSLPLSDKAKKAIVKIKPTNFKAFGHLSIKALQKITPHILEGMTYDKACEAAGYDFKKQSASLEQITNPVVKRAITQTLKVVRAIERKYGKPYFIKVETARDLAKNFKDRNAIKKENEENQGYNEDIKSIITNGYEASPKTKGGKQLLNHLKEFNVRLNKNADFNGQQIIKVKLYREQQGKCLYSGNPIDFETMLRDDNAYQVDHIVPFSRSNNDGITNKVLVFTEENQKKADRTPFEYFGTDERRWEKFVALVETTYKTRDVKTSDKATNAINYEYNGYAMKKKQNLLLQDYKNDSWNVRALNDTRYITRFIQNYLRQNVDFAEGEEKQRIIAPNGTTTAYLRKR

SEQ ID NO: 363 - protein, 1117 aa, Capnocytophaga ochracea
MKHILGLDLGSNSIGWAFVQQDFENKQGKIIATGSRIIPMDQGILGDFERGNTVSQTAERTTYRSMRRLRERHLLRRERLHRVLHLLGFLPPHYDAQIDFTKRYGKFIDNAEPKIAYNNGNFIFMNSFNEMVEDFKKHQPQLFYKKSNGEESRIPYDWTIYYLRKKALSQKITQQELAWLILHFNQKRGYYQLRGEEETENPNKEVAFHSLKVVDVEAEAPNKKGEIWYTIRLENGWIYRRTSKNPLDDWKGKTRDFIVTTDLNDDGTIKLDKEGKEKRSFRAPDENDWNLLKKKTEHDIDFSGKPVGTYIYDHLLQNPNQKIKGKLVRTIERKYYKDELKAILAKQIALQPELFTETLLADCIRELYRKNETQQQNLLSKDFLHLFVEDIIFYQRPLCSKKSTIANCTLEKRSYIDKETNERKDAPIKVCAKSNPYYQEFRVLQWLQNLRIYEIETDREVTAEFIETPQDYEALFNFLMSQKEIDNEGLLKYFLFAKNPQIKDKAAKSELKKWLTTYRWNYVYDAADNSSKKYPMNETGYELQRYLQKVEGLPANFLTFDITYQLWHLLYSVKDKVEFEKALKKFAKKKQLDKTSFVDSFKNFKPYPNEYGSFSEKAIKKLLPLMRFGNHWDFNRIDVSTQKRIDDLINGVANEDIRTIIREKAEKYQLNSETCFQDLPLWLAQYVVYNRHAEATDIEKWTSVSDLEAYLEDFKQHSLRNPIVEQVVTETLRVVRDIWQQYSGGQANFFDEIHIELGRELKKTAEERKQLSDKNQENENTNLRIKKLLAELKEDASIQNVRPYSLVQQELLKIYEEGVFSSTDEIEEDIQKIRKKVEPTPPEIQRYKLWLEQKYKSPYTGEVISLTKLFTEEYEIEHIIPQSRYYDDSLSNKVICESAVNKLKTNQLGLEFIQNHHGEKVRITANKEVTIFTEEQYKEFVKKHYANNSAKQQKLLLNEIPEKMVARQLNDTRYISKCISEILSKIVRSDEKDEGVNSKNIIPCTGKITTALKQDWGLNDVWNELILPRFERMNQLTQTQLFTSYNDRLQKNLPTVPIEYSQGFQKKRIDHRHHAMDALVIACATREHINYMNNQHALDKSKDKKEKQQSRIDLHPL

SEQ ID NO: 364 - protein, 303 aa, Capnocytophaga ochracea
MSFKQNLRVINKATNYYEKWEEKNGVLVKKKVKQEGTNWAIRKPLHKETVSGKIVLDRKIGKDKILTATRKAVDITFTEKIISSITDTGIQKILLNYLKYKGSPEVAFSAEGLEELNKNIAQYNDGKKHQPIYKVRIFEEGSKFPLGETGAKATKYVEAAKGTNLFFGVYQGKEKRTYATIPLNEVIERQKQGLPSVPERNEKGEPLLFSLSPNDLVYVPMEGEIAETIDFNNLSKEQKERIYKTVSFTGNQCFFVQEAVASPIVNKMEYSPLNKMERDILGIMIKEVCVKLKVDRLGNIIKA

SEQ ID NO: 365 - protein, 1471 aa, Capnocytophaga sp.
MCKYFYIKNFITFVLSKSIIPMKHILGLDLGSNSIGWAFVQQDFENKQGKIIATGSRIIPMDQGILGDFERGNTVSQTAERTTYRSTRRLRERHLLRRERLHRVLHILGFLPPHYDAQIDFTKRYGKFIDNAEPKIAYNNGNFIFMNSFNEMIEDFKKHQPQLFYKKSNGEESKIPYDWTIYYLRKKALSQKITQQELAWLILHFNQKRGYYQLRGEEETENPNKEVAFHSLKVVDVEAEAPNKKGEIWYTIRLENGWIYRRTSKIPLDDWKGKTRDFIVTTDLNDDGTIKVDKEGKEKRSFRAPDENDWNLLKKKTEHDIDFSGKTVGAYIYDHLLQNPNQKIKGKLVRTIERKYYKDELKAILAKQIALQPELFTETLLADCIRELYRKNETQQQNLLSKDFLHLFVEDIIFYQRPLRSKKSTIANCTLEKRSYIDKETNERKDAPIKVCAKSNPYYQEFRVLQWLQNLRIYEIETDREVTAEFIETPQDCEALFNFLMSQKEIDNKGLLKYFLFAKNPQIKDKAAKSELKKWLTTYRWNYVYDAADNSSKKYPMNETGYELQRYLQKVEGLPANFLTFDITYQLWHLLYSVKDKVEFEKALKKFAKKKQLDKTSFVDSFKNFKPYPNEYGSFSEKAIKKLLPLMRFGNHWDFNRIDVSTQKRIDDLINGVANEDIRTIIREKAEKYQLNSETCFQDLPLWLAQYVVYNRHAEATDIEKWTSVSDLEAYLEDFKQHSLRNPIVEQVVTETLRVVRDIWQQYGGGQANFFDEIHIELGRELKKTAEERKQLSDKNQENESTNLRIKKLLAELKEDASIQNVRPYSLVQQELLKIYEEGVFSATDEVEEDIQKIRKKAEPSKADLQRYKLWLEQKYKSPYTGEVISLTKLFTEEYEIEHIIPQSRYYDDSLSNKVICESAVNKLKTNQLGLEFIQNHHGEKVRITANKEVTIFTEEQYKEFVKKHYANNSAKQQKLLLNEIPEKMVARQLNDTRYISKYISEILSKIVRSDEKDEGVNSKNIIPCTGKITTALKQDWGLNDVWNKLILPRFERMNQLTQTQLFTSYNDRLQKNLPTVPIEYSQGFQKKRIDHRHHAMDALVIACATREHINYMNNQHALDKSKDKKEKQQSRIDLRTILCEKKNNNWQFKKPWSTFTQEAKEALEHIVVSFKQNLRVINKATNYYEKWEEKNGVLVKKKVKQEGTNWAIRKPLHKETVSGKIVLDRKIGKDKILTATRKAVDITFTEKIISSITDTGIQKILLNYLKYKGSPEVAFSTEGLEELNKNIAQYNNGKKHQPIYKVRIFEEGSKFPLGETGAKATKYVEAAKGTNLFFGVYQGKGKRTYATIPLNEVIERQKQGLPSVPERNEKGEPLLFSLSPNDLVYVPMEGEIAETIDFNNLSKEQKERIYKTVSFTGNQCFFVQEAVATPIVNKMEYSPLNKMERDILGTMIKEVCIKLKVDRLGNITKA

SEQ ID NO: 366 - protein, 1450 aa, Capnocytophaga sp.
MKHILGLDLGSNSIGWAFVQQDFENKQGKIIATGSRIIPMDQGILGDFERGNTVSQTAERTTYRNTRRLRERHLLRRERLHRVLHILGFLPPHYDSQIDFTKRYGKFIDNAEPKIAYNNGNFIFMNSFNEMIEDFKKYQPQLFYKKSNGEESKIPYDWTIYYLRKKALSQKITQQELAWLILHFNQKRGYYQLRGEEETENPNKEVAFHSLEVVDVEAEAPNKKGEIWYTIRLENGWIYRRTSKIPLDDWKGKTRDFIVTTDLNDDGTIKLDKEGKEKRSFRAPDENDWNLLKKKTEHDIDFSGKTVGAYIYDHLLQNPNQKIKGKLVRTIERKYYKDELKAILAKQIALQPELFTETLLADCIRELYRKNETQQQNLLSKDFLHLFVEDIIFYQRPLRSKKSTIANCTLEKRSYIDKETNERKDTPIKVCAKSNPYYQEFRVLQWLQNLRIYEIETDREVTAEFIETAQDNEALFNFLMSQKEIDNESLLKYFLFAKNPQIKDKVAKSELKKWLTTYRWNYVYDAADNSSKKYPMNETGYELQQYLQKVEGLPANFLTFDITYRLWHLLYSVKDKVEFEKALKKFAQEYQLDEASFVDSFKNFKPYPNEYGSFSEKAIKKLLPLMRFGNHWDFNRIDVSTQKRIDDLINGVANDEIRTIIREKAEKYQLNSETCFQGLPLWLAQYVVYNRHAEAADIEKWTSVNDLEAYLEDFKQHSLRNPIVEQVITETLRVVRDIWQRYGGGQANFFDEIHIELGRELKKTAEERKQLSNRNQENENTNLRIKKLLAELKEDASIQNVRPYSPVQQELLKIYEEGVFSATDEVEEDIQKIRKKAEPTTPEIQRYKLWLEQKYKSPYTGEVISLTKLFTEEYEIEHIIPQSRYYDDSLSNKVICESAVNKLKTNQLGLEFIQNHHGEKVRITANKEVTIFTEEQYKEFVKKHYANNSAKQQKLLLNEIPEKMVARQLNDTRYISKYISEILSKIVRSDEKDEGVNSKNIIPCTGKITTALKQDWGLNDVWNELILPRFERMNQLTQTQLFTSYNDRFQKNLPTVPIEYSQGFQKKRIDHRHHAMDALVIACATREHINYMNNQHALDKSKDKKEKQQSRIDLRTILCEKKNNNWQFKKPWSTFTQEAQEALEHIVVSFKQNLRVINKATNYYEKWEEKNGVLVKKKVKQEGTNWAIRKPLHKETVSGKIVLDRKIGKDKILTATRKSVDITFTEKIISSITDTGIQKILLNYLKYKGSPEVAFSAEGLEELNKNIAQYNDGKKHQPIYKVRIFEEGSKFPLGETGAKATKYVEAAKGTNLFFGVYQGKGKRTYATIPLNEVIERQKQGLPSVPERNEKGEPLLFSLSPNDLVYVPMEGEIAETIDFNNLSKEQKERIYKTVSFTGNQCFFVQEAVATPIVNKIEYSPLNKMERDILGTMIKEVCIKLKVDRLGNITKA

SEQ ID NO: 367 - protein, 1435 aa, Capnocytophaga sp.
MKNILGLDLGTTSIGFAHIVEDENKEKSEIKELGVRIVSLATDEQSDFEKGKSISTNANRTLKHGARLNLDRYQQRRKFLIDLLQKANLITSASILAENGKNTTHSTWQLRAKAVTERIEKEEFARVLLAINKKRGYKNSRKTKTEDEGQAIDGMAIAKCLYDENLTPGQLSLQLLQQNKKLLPDFYRSDLQKEFDLVWNLQKQFYPDILTDSFYKELQGKGKDATSKAFSKRYHFDTAENKGSKESVRLQAYQWRAEAISKQLSKEEVAYVLTEINNNLNNSSGYLGAISDRSKELYFNRQTVGQYLYAQLQENRHNSLKNKVFYRQDYLDEFERIWETQASFHKELTDELKKQIRDVVIFYQRKLKSQKGLVSFCEFESKEIEIEKDGKAITKSIGARVVPKSSPLFQEFKIWQILNNVTCKRKGIRKKKSSAKSTELDLFNEPSQSIFSLDMECKQLLFDELNLKGDLKSDKVLKLLGYSPQEWEINYNQLEGNRTQKSLYEAYLKIIEIEGYEVKDILQIKSTKDDWSLDESPLSASEIRERVKVIFQTLGICTKILYFDPLLPVKEFEQQYSYQLWHLLYSYESDDSTSGNETLYRILEKKYAFKREHATILANVALQDDYGSLSTKAIRKIYPYIKENQYSTACELAGYKHSKLSLTTEELEARELKNIIPLLKKNALRNPVVEKILNQMINVVNALIEKNSERDAEGKITKYFHFDEIRIELARELKKNAQERYEMTQNINKAKLEHQKISEKLQKQFGIKNPTKSDIIRYRLYQELEHNGYKELYTNTYIAPDVLFSKNIDIEHIVPKARVFDDSFSNKTLAFKEFNIKKGESTAFDYITSLNCEGELNQYLTRVENAYKTKSISLTKYKNLLKKASEIGDGFINRDLRDTQYIAKKAKEILFQVTKNVLSTSGSITDRLREDWGLVDVMKELNMPKYQSLGLTEVEERKDGNKVTVIKDWTKRNDHRHHAMDALTVAFTKPSYIQYLNHLNARKDENNKNYSVILAIEKKETIKVPINNGKNKRVFIEPILNFRQVAKKHLEEIFISHKAKNKVVTKNINKPAGTDKQQITLTPRGQLHKETIYGKYQYYVNKEEKVGVKFDERTITKVSNPLYREALLKRLQANDNDPKKAFAGKNALSKNPIYLDEAKTKTLPEKVNLTYLEEDFSIRKDISPDNFKDLKSIEKVIDQGVKRILIKRLQAYDNDPKKAFVDLEKNPIWLNKEKGIAIKRVTISGVSNAQPLHIGKDHLGKTTLNKEGKEVPVDYVSTGNNHHVAIYRDKEGNLQEQIVSFFEAVVRAQQGLPIIDKNYKQAEGWQFMFTMKQNEMFVFPNEATGFNPAEIDLLDPKNKKLISPNLFRVQTISIVKYGNSVVRDFKFRHHLETTLQDDKILQGITFQQIKSLEPLRNIVKVRINHLGDIVNIGEY

SEQ ID NO: 368 - protein, 1432 aa, Capnocytophaga sp.
MKNILGLDLGTTSIGFAHIVEDENKEKSEIKELGVRIVSLTTDEQSDFEKGKSITTNANRTLKHGARLNLDRYQQRRKYLIDLLHKANLITPSSILAENGKNTTHSTWQLRAKAVTERIEKEEFARILLAINKKRGYKSSRKAKTEDEGQAIDGMAIAKRLYDENLTPGQLSLQLLQQNKKLLPDFYRSDLQKEFDLVWNFQKQFYPDILTDIFYKELQGKGKDATSKAFSKRYHFDTAENKGSKESVRLQAYQWRAEAVSKQLSKEEVAYVLTEINNNLNNASGYLGAISDRSKELYFNRQTVGQYLYAQLQENRHNSLKNKVFYRQDYLDEFERIWETQALFHKELTDELKKQIRDVVIFYQRKPKSQKGLISFCEFESKEIEIEKDGKTITKNIGARVVPKSSPLFQEFKIWQILNNVICKRKGIRKKKISAKTTQLDLLNESSQTIFSLDMECKQLLFDELNLKGDLKSDKVLKLLGYSPQEWEINYNQLEGNRTQKALYEAYLKIVEMEAHDVKDILQIKSTKDDWSLDESPLSASEIRESVKAIFQALGICTKILYFDPLLPVKDFEEQDSYQLWHLLYSYESDDSTSGNETLYRILEKKYAFKREHARILANVALQDDYGSLSTKAIRKIYPNIKENQYSTACEMAGYKHSKLSLTTEELEARELKNIIPLLKKNALRNPVVEKILNQMINVVNALIEKNSERDAEGKITKYFHFDEIRIELARELKKNAQKRYEMTQNINKAKSEHQKISEILQKEFGIKNPTKSDIIRYRLYKELEHNGYKELYTNTYIAPDVLFSKNIDIEHIVPKARVFDDSFSNKTLAFKDFNIKKGESTAFDYITSLKNEEKLNQYLARVENAYKTKNISPAKYKNLLKKASEIGDGFINRDLRDTQYIAKKAKEILFQVTKNVLSTSGSITDRLREDWSLVDVMKELNMPKYQSLGLTEVEERKDGNKVTVIKDWTKRNDHRHHAMDALTVAFTKPSYIQYLNHLNARKDENNKNYSVILAIEKKETIKVPTNNGKNKRVFIEPIPNFRQVAKKHLEEIFISHKAKNKVVTKNTNKPAGTNKQQITLTPRGQLHKETIYGKYQYYVNKEEKVGVKFDKETIAKVSNPLYREALLKRLQANDNDPKKAFTGKNALSKNPIYLDEAKTKTLPEKVNLTYLEEDFSVRKKIVPKNPTSKEFVPNLKSIEKVVDEGVRNILIERLRVYNNDPEKAFVDLEKNPIWLNKEKGIAIKRVTISGVNNAQPLHIGKDHLGKTTLNKEGKEIPVDYVSTGNNHHVAIYRDKEGNLQEQIVSFFEAVVRTQQGLPIIDKTYKQEEGWQFLFTMKQNEMFVFPNEATGFNPAEIDLLDPKNKKQISPNLFRVQKIATKDYFFRHHLETNVETDNVLKNTTWKREGLSGLKDIVKVRINHLGDIVSIGEY

SEQ ID NO: 369 - protein, 1426 aa, Capnocytophaga sp.
MKNILGLDLGTTSIGFTHIVEDENKEKSEIKELGVRIVSLTTDEQSDFEKGKSISTNANRTLKHGARLNLDRYQQRRKFLIDLLQKANLITSSSILAENGKNTTHSTWQLRAKAVTERIEKEEFARVLLAINKKRGYKSSRKAKTEDEGQAIDGMAIAKRLYDENLTPGQLSLQLLQQNKKLLPDFYRSDLQKEFDLVWNFQKQFYPDILTDSFYKELQGKGKDATSKAFSKRYHFDTAENKGSRESVRLQAYQWRAEAISKQLSKEEVAYVLTEINNNLNNASGYLGAISDRSKELYFNRQTVGQYLYAQLQENKHNSLKNKVFYRQDYLDEFERIWETQASFHKELTEELKKQIRDVVIFYQRKLKSQKGLISFCEFESKEIEIEKDGKTITKSIGARVVPKSSPLFQEFKIWQILNNVTCKRKGIRKKKSSAKSTELDLFNEPSQTIFSLDMECKQLLFEELNLKGDLKSDKVLKLLGYSPQEWEINYNQLEGNRTQKALYEAYLKIVEMEAHDVKDILQIKSTKDDWALEESPLSASEIRERVKAIFQTLGICTKILYFDPLLPVKEFEEQDSYQLWHLLYSYESDDSTSGNETLYRILEKKYAFKREHATILANVTLQDDYGSLSTKAIRKIYPYIKENQYSTACEKAGYKHSKLSLTTEELEARELKNIIPLLKKNALRNPVVEKILNQMINVVNALIEKNSERDAEGKITKYFHFDEIRIELARELKKNAQERYEMTQNINKAKLEHQKISGILQKEFGIKNPTKSDITRYRLYQELAHNGYNDLYTNTYIPKELLFSKNIDIEHIVSKARVFDDSFSNKTLAFREFNIKKGESTAFDYITSLNNEEELNQYLNRVENAYKTKNISPAKYKNLLKKASEIGDGFINRDLRDTQYIAKKAKEILFQVTKNVLSTSGSITDRLREDWGLVDVMKELNMPKYQSLGLTEVEERKEGNKVTVIKNWTKRNDHRHHAMDALTVAFTKPSYIQYLNHLNARKDKNNKNYSVILAIEEKETIKVPTNNGKNKRVFIEPIPNFRQVAKKHLEEIFISHKAKNKVVTKNTNKPAGTDKQQITLTPRGQLHKETVYGKYQYYVNKEEKIGVKFDKETIAKVSNPVYREALLKRLQANDNDPKKAFAGKNALSKNPIYLDEAKTKTLTEKVNLTYLEEDFSIRKDISPDNFKDLKSIEKVIDQGVKRILIKRLQDYDNDPKKAFVDLEKNPIWLNKEKGIAIKRVTISGVNNAQPLHIGKDHLGKTTLNKEGKEIPVDYVSTGNNHHVAIYRDKEGNLQEQIVSFFEAVVGAQQGLPIVDKTYKQAEGWQFLFTMKQNEMFVFPNEATGFNPAEIDLLDPKNKKQISPNLFRVQKIATKDYFFRHHLETNVDTDNVLKNTTWKREGLSGLKDIVKVRINHLGDIVSIGEY

SEQ ID NO: 370 - protein, 1450 aa, Capnocytophaga sp.
MKRILGLDLGSNSIGWAFVEQDFENKQGKIIATGSRIIPMDQGILGDFEKGNTVSQTAERTTYRSMRRLRERHLLRRERLHRVLHILGFLPPHYDAQIDFTKRYGKFIDNAEPKIAYNNGNFIFMNSFNEMIEDFKKYQPQLFYKKSNGEESKIPYDWTIYYLRKKVLSQKITQQELAWLILHFNQKRGYYQLRGEEETENPNKEVAFHSLKVVDVEAEAPNKKGEIWYTIRLENGWIYRRTSKIPLDDWKGKTRDFIVTTDLNDDGTIKVDKEGKEKRSFRAPDENDWNLLKKKTEHDIDFSGKTVGAYIYDHLLQNPNQKIKGKLVRTIERKYYKDELKAILAKQIALQPELFTETLLADCIRELYRKNETQQQNLLSKDFLHLFVEDIIFYQRPLRSKKSTIANCTLEKRSYIDKETNERKDTFIKVCAKSNPYYQEFRVLQWLQNLRIYEIETDREVTAEFIETAEDYEALFNFLMSQKEIDNEGLLKYFLFAKNPQIKDKVAKSELKKWLTTYRWNYVYDAADNSSKKYPMNETGYDLQRYLQKVEGLPANFLTFDITYRLWHLLYSVKDKVEFEKALKKFAQEYQLDEASFVDSFKNFKPYPNEYGSFSEKAIKKLLPLMRFGNHWDFNRIDVSTQKRIDDLINGVANDEIRTIIREKAEKYQLNSESCFQGLPLWLAQYVVYNRHAEATDIEKWTSVSDLETYLEDFKQHSLRNPIVEQVVTETLRVVRDIWQQYGGGQANFFDEIHIELGRELKKTAEERKQLSNRNQENENTNLRIKKLLAELKEDASIQNVRPYSPVQQELLKIYEEGVFSSTDQVEEDIQKIRKKAEPTTPEIQRYKLWLEQKYKSPYTGEVISLTKLFTEEYEIEHIIPQSRYYDDSLSNKVICESAVNKLKTNQLGLEFIQNHHGEKVRITGNKEVTIFTEEQYKEFVKKHYANNSAKQQKLLLNEIPEKMVARQLNDTRYISKYISEILSKIVRSDEKDEGVNSKNVIPCTGKITTALKQDWGLNDVWNELILPRFERMNQLTQTQLFTSYNDRFQKNLPTVPIEYSQGFQKKRIDHRHHAMDALVIACATREHINYMNNQHALDKNKDKKEKQQSRIDLRTILCEKKNNNWQFKKPWSTFTQETKEALEHIVVSFKQNLRVINKATNYYEKWEEKNGVLVKKKVKQEGTNWAIRKPLHKETVSGKIVLDRKIGKDKILTATRKEVDITFTEKIISSITDTGIQKILLNYLNYKGSPEVAFSAEGLEELNKNIAQYNDGKKHQPIYKVRIFEEGSKFPLGETGAKATKFVEAAKGTNLFFGVYQGKEKRSYATIPLNEVIERQKQGLPSVPERNEKGEPLLFSLSPNDLVYVPMEGEIAETIDFNNLSKEQKERIYKTVSFTGNQCFFVQEAVATPIVNKMEYSPLNKMERDILGTMIKEVCIKLKVDRLGNITKA

SEQ ID NO: 371 - protein, 1437 aa, Capnocytophaga sp.
MKYIKYILGLDIGSNSIGWALIQLDLLQKTKRIIATGSRIIPMDQKVLSDFGKGITISPTAQRTSYRNARHCRERHLLRRERLHRVLHILGFLPTHYDKQIDFSKRYGKFVDNTEPKIAYNERKFLFMDSFQEMLADFKIHQPDLFYTKKNGEESKIPYDWTIYYLRKKALSRKISKEELAWIILNFNQKRGYYQLREEEEENKENDFEIISSKIISVIKKDKDKKYNKYWYDIILENGLVYQAAFYNDFVYNWINQDREFIIERISLKNGTEKVKLSYLPTFDEIDKMDKKEQDKYYKKIKIKTENSIGNKTVGCYIYDHILQNPNEKIKGKLVRTIERKYYKEELKAILEKQVALQPELFTDQLFADCIRELYSKNEAQQRNLAARDFVHLFVEDIIFYQRSLRRQKSTLANCSLESRSYIDKDSHTRKEAPLKVCPKSNPYYQEFRVLQWLQNLKIYEIDTDQEVTHEFIKTLEDKQQFFDFLMNQKEIDCEELLKYFLNQTYPNAREKALKSELKKWKDTYRWNYVYDIGEKSSKKYPMNETRYELKRHLEKVANLPDDFLSSEVEYLLWHLIYSVKDKVAYEKGLKTFAQKHHLDKDSFVESFKKFKPYPSEYGSFSEKAIRKLLPLMRFGSYWDFNHIDKNTQKRIEDLITGVENEEIRTILREKAEKYQLEKETDFQDLPLWLAQYIVYNRHAEASSLEKWTSVNDLETYLNEFKQYSLRNPIVEQVVMETLRVVRDIWQQYGQGQASFFDEIHIELGRELKKTAKEREKLSKQNQKNEDINLSIKEKLKELEKYNTRAYSITHQEKYKLWLEQKHISPYTGQIISPENLFTDNYEIEHIIPQSRFFDDSLSNKVVCESIVNKAPYKDRQLGLEFIKNQGGRIVKELSTENKTIKIFTEEQYRTFIKEHYSNNPEKTKKLLLEEIPEKMVARQMNDTCYISKFISEILSKIVRSDEQDEGVHSKNVILCTGKITSALKQDWGVNDVWNDLILPRFERMNDLTQSTLFTTYNEKYQKYLPTVPMEYSNGFQKKRIDHRHHAMDAIIIACATREHINYINNQHALEKGKDKKEKQKEHDKLREKLCIKKDNKGSEENYSWIFKKPWDTFTQEVQAALEGIVVSFKQNLRVINKATNYYERWVEENGKYIKKMVKQEGTNWAIRKPLHEETISGKIYLDREEITKNDILTATRKTVDSSFDEKRIKKITDTGIQKILLNYLKYKGSPEIAFSPEGLEELNKNLSIYNDGKPHKPIYKVRIYEKGSGRFALGEKGRKYKKYVQGAPNLYFGIYQGANKRSFATIPLNEVIERQKQGRPSIPEYNEKGDPLLFSLSPNDLVYVPVEGEIIEDIDFQNLSKEQKERIYNVNDFSSTCYFTPNRIAKAIFPKEVDLQRKGDKLPGSYDTKTASLEGIQIKEVCIKLKIDRLGNISKA

SEQ ID NO: 372 - protein, 1140 aa, Catellicoccus marimammalium
MKNMTKVNVGLDVGISSAGWSVINAETNQILESGVRLFSGSDADENVNRRNQRQGRRLFRRRKLRIQEAKKYLENVFQLKDIEPKDEWNPYEIRVRALNEKVSKEELSIALLNIVKHRGISYELEDVTDEEGTNTQSFQSGLDYNRRLLKTKTVGEIQYDRLQKYGQVRGQIQTEDGLLINIFPTKNYVEEVERILETQKKYHPEIDDVFIEKIISFVTRKREYFVGPGNEKSRTDYGIYRENGETLDNLFEILIGKDKFYPEEYRAAGSSYTAQIFNLLNDLNNLRIPTTEDHHLTKAQKEEIITELKNTSRLSGGMLKLISKVTKAPKEEISGYRKDEKDKPDLHSLAYYRKQKNMLEKEGIQIADFSEELLDELATMMTLNTEPGEIRKQLNKITNQYDILTPEVIEVLVKNHTAFVATSNHKWHRFSLKLMKEFIPELLETSKEQSTILCERGFIQNRASYLDENHHFNYAELRENLYNPVVRKSTCEMLKVFTAIQEKYPNIQNVIVELPRETNEDEQKRKIKKINDNNAKRKKEILKEAQAQSGLSEEALEEKLLKTKGLYLKLMLWYEQEGKCVYSGQEIPLSDLLQNKGGYEVDHIIPISISFDDRLCNKVLVRQQLNSQKSNQTPFEYMTTHTDGHLSFHELKELVGKNKRFSKEKRELLLAEIYSNDIETRKRFINRNLVDTSYTARIVLNALQQYKKENQLSMNVSVVRGAMTNILRKKVKLDKTRETFHHHAIDASLMAVIPNIEFFKERKEWLPKSANEEVVEVEVSEEETMPEKEFKVKMRLPESFIQDVQILQRNSFAKEEVSGPQTRERNLKIKFSHQVDQKMNRKVADDTIYGTRQAQLGKDKKEETYVIGKIKDIYNYDEYVRFKKRYDKNKESFLMYHHDPQTFEKLEEILAQYPEYIEDEKGKKKKVSPFALYREENGPVTKYAKKNNGPVIKQLKYYDSKLNRKIDISHKYSTKNRQVVLQSLKPYRTDVYRNQDTGEYTLVGIDQNDGKFVNGHYGIPKSRYEEIKANNKLSEHDEFVFSLYKNSMVKVIDENGESIVVRYLSRSMPNRKNNAEIKPVEKYQFEDGEVVPVYGKCRKQMQTVFVKKGWTLLKGNTDILGNTYFVEKESENPKKMIDDK

SEQ ID NO: 373 - protein, 1419 aa, Chryseobacterium sp.
MMIKNILGLDLGTNSIGWALIKQNFENKYGEILGMGSRIIPMSQDVLGEFGKGNSVSQTAARTGYRGVRRLRERFLLRRERLHRVLNVLNFLPEHYASQIDFEKRFGKFKYETEPKLAYNNDGFFFKNSFDEMLGDFKDHQFHLLENGRKVPYDWTIYYLRKKALSQKIEKEELAWILLNFNQKRGYYQLRGEDFEEEKDRVFVRLKVDRVVDSGENIKGKILYDVYFENGWKYEKQIVKTEDWIGRTKEFIVTESILKNGDTKRTFKAVDSEKDWIAIKTKTEQEIDKSHKTVGAYIYEALLQNPKQKIKGKLVRTIERKFYREELKKILERQKEFHPELQSDDLYNDCIRELYRNNEAHQITLSKKDFVHLLLNDLIFYQRPLRSQKSSVSNCTLEFRKYKDENGVEHAQYLKTIPKSNPYYQEFRVWQWMFNLNIYRKDDDTNVTKEFLSSTEDYETLFEFLNNRKEVDQKALLRHFKLNEKTHRWNYVEDKKYPCNETKTMISTRLEKVENYPSDFLTREMEQNIWHIIYSVNDKIEYEKALKSFAHKNNLDENSFFEAFKKFPPFKSEYGSFSEKAIKKLLPLLRLGKYWNWESIDRKSQGRIEKIITGEFDGNIKDKVREKAIHLTAENDFQGLQLWLAQYIVYGRHSEASMIGKWNSADDLEEFLKGFKQHSLRNPIVEQVITETLRVVKDIWLKYGNGAKDFFSEIHIELGREMKQTKDERVDATKRITENENTNLRIKALLAEMMNDNSVENIRPYSPMQQEILKIYEDGILKSDIEIDDDILKISKTAQPSSSDLKRYKLWLEQRYKSPYTGQIIPLNKLFTSEYEIEHIIPQSRYFDDSFSNKIICESAVNKLKDNYIGLGFIKQFGGMIVECGFGKSVEIFKAEEYEDFVKKHYANNRSKRNKLLLEEIPEKMIDRQLNDTRHISKYISGVLSNIVRQEDGTDEGVNSKNIVPGNGKITTQLKQDWGLNDVWNELILPRFERMNQLTNSTDFTSWNKNHQKFLPTVPIEFSKGFSKKRIDHRHHAMDALVIACATKDHINLLNNQSAKSDTKRYDLKRKLMKFERVVYSHSKTGEKIEKEVPKQFLKPWDNFTVDAKNKMETIIVSFKQNLRVINKATNHYEKWIEKDGIKRKELIKQEGTNWAIRKPMHKETVSGKVDLPGIKIPKGKILTATRKSLDTSFDLKTINSITDTGIQKILKNYLEFKGSSELAFSPEGIEDMNKNIEKFNDGKPHQSINKVRIFELGSKFSVGQTGNKKDKYVEAAKGTNLFFAVYEDKNGKRSYETIPLNEVIERQKQGLDSVSFKNKEDFLLCPNDLVYVPSEDELENIYNIDFKNLTTEKTGNIYKVVSFSGNQIFFIRQDIAISIVNKAEFSTLNKMERAIDGSMIKENCIKLKIDRLGNIAKI

SEQ ID NO: 374 - protein, 1065 aa, Clostridium perfringens
MNKDINYALGLDIGITSVGWAVINLDLNRIEDLGVRIFNAAENPKDGSSLALPRRLARGRRRLLRRKAYRVERVRKLIVKNNILTKEELEGLFKNKEVIDVWEARVKGLDYKLSREEWAKILINFCKRRGFKSNRKNETKDKEAGQILSSISYNIEKMKETNSRTIGEYIYNEVKNSDDSYAPLRNKFGEYKMCVSRDVLREEIHTLFEKQRELGNNFASDEIEDKYFEIFNSQRPFSNFEDLEKLVGFCTFERKKHKRAPKHCISSEEFTLYEGINKLSIIKDGEKRKLSEEERTLVVNEAFNKKEIKYTTLRKLLGLSEDELFSTLTYSIDKDISKTENTKFVSLKGYHEIKRAIEKGVSKKAWQDIENNRNLLNDIAYVLTLGKTDDEIEKQLRLRNVPEELFESLLDMSFSKFNNLSIYALEKILPFMKEGYQYNEACEKAGYNFKAIYEGVRTKKLPVIEIDEIVNPVVNRALAQTRKVINSVIDKYGSPVRINIELARDLAKNFKDRKLIEKEQKENRANLDKIRENLRELMDKEPTAVEVLKYRLWEQQRGECAYTQSQIALERLFSPGYCEIDHIIPFSRSFDDSLSNKILVLGSENQRKGNKIPYEYFGEDSERWNSFEIWVKGSYLNYKKKANLLKKKFTEEEQRDWKARNLQDTKYICRYISNFVNNRLEFKESENKQKVITVNGRATAYLRSRWGLNKVREDGDKHHALDAAVVGVTTQGMVQKISKYSKAHELYTVRKNDEFVDVETGECVDVDEYKEIRKDILPRPWRGFSEELKLRLSDNPLEELKKLPIETYNEEFIKENVKPIFVSRVPFRKISGKLFKETIYSERAFKDGYFVSKKSLVDLKRGDLDNFYNYECDKKLYDAISERMKEFNYNGKKAFESPFRKPTKSGKEGPVVRSVKIKSAAPFKDGIPMNEGLVAKEGMVRIDIYEKEGKYFVVPVYRYQLAKGIVPKRAAIAGKSELKWPIMDQTYNFKFSIFKNDLIEIKYAKKDGYFGYYDGFDRHTASLVIENHDNSDRYRGIGVKTGVVEFNKYEVDVLGNYHKVNLGGN

SEQ ID NO: 375 - protein, 1099 aa, Corynebacterium accolens
MSLSYRVGIDVGTYSLGCTAIEVDDNDQPVNILSSVSLIHDSGLDPDQQKRAVTRLASSGVARRTRRLYRRRRRRMINLEKFLTSQGWETRPFEHYSDPYLPWNARVALVNGYISDDAQRGMYLSIAFRHIANHRGWRNPYWKVSSLYSPDKPSDAFEQIRKELEESTGHKIPETVTVGQLISFAQFGKDRLRGGGKKKDEKKPQEQVNQAVISARLHQIDHAREINEICRVQKIDDALRKQILDLVFAAESPKGAQIGRVGKDPLQPKLPRALKASDAFQQYRIVALAGNLRIYRDGVSTPLDRDEKLIVFNYLINLSHKEEPSWLKVAEVLNIDRGQLHGTATMTDDGERAGAAPPVHDTNRTILGCKIKPLVHWWEGANDDERAAMLKALSNSEVEDFDSPAGAQTQAFFANLDESEQEKLDSLHLPIGRAAYSEDTLMRLTSRMLDENLDLYEARLAEFDIPKDWAPPAPRIGEPVGNPAVDRVLKGVARWLEAAADEWGAPKSVVIEHVRDGFISKSKANEIDRANNARHKRNRELFKQMQENLGIDGKLRSSDLWRYQSVQRQNCQCAYCGSPITYTTCEMDHIVPRAGEGSTNTRDNLVATCHRCNLAKKNIPFAVWAAQTNIPGVSVKEALDRTRHWSEDSGMTSKDFKKFRKNVCDRLKRTVVDEPLDARSMESVAWMANELRGRVAQRFQEENTVVNVYRGELTAEARRAAGISDKLRFIDGTGKSRLDRRHHAVDAAVVAFTQNYVAETLAIRSNKKREAQLLQAAEQWKEFTGSDAEHRAAWNAWLPKMQKLAVLLQKALDEDRIAVTSNLRLRLGNGRAHEDSIGELKTIRVGDAISVTDIDRASSEALWCALTREPDFDENNGLPENPDRRIRIHGTWYDAEDDIEVFPVGAGAIKVRGGYAELSRFHHARIYKIPGKKAPVYCMLRVYNADLIRHRHEDLFSVEIKPQTMSVRQAEPKLRKALAENTAEYLGWLVTDDELVIDTSNFNTGQIAEMQSELGQVRRWRLDGFYSPSTLRLRPLQMSAEGLREDTSIGAKKIIDRPGWLPAINKLFGEGHVTVVRRDALGRARLTSNAHLPISWKAE

SEQ ID NO: 376 - protein, 1084 aa, Corynebacterium diphtheriae
MKYHVGIDVGTFSVGLAAIEVDDAGMPIKTLSLVSHIHDSGLDPDEIKSAVTRLASSGIARRTRRLYRRKRRRLQQLDKFIQRQGWPVIELEDYSDPLYPWKVRAELAASYIADEKERGEKLSVALRHIARHRGWRNPYAKVSSLYLPDGPSDAFKAIREEIKRASGQPVPETATVGQMVTLCELGTLKLRGEGGVLSARLQQSDHAREIQEICRMQEIGQELYRKIIDVVFAAESPKGSASSRVGKDPLQPGKNRALKASDAFQRYRIAALIGNLRVWVDGEKRILSVEEKNLVFDHLVNLTPKKEPEWVTIAEILGIDRGQLIGTATMTDDGERAGARPPTHDTNRSIVNSRIAPLVDWWKTASALEQHAMVKALSNAEVDDFDSPERAKVQAFFADLDDDVHAKLDSLHLPVGRAAYSEDTLVRLTRRMLSDGVDLYTARLQEFGIEPSWTPPTPRIGEPVGNPAVDRVLKTVSRWLESATKTWGAPERVIIEHVREGFVTEKRAREMDGDMRRRAARNAKLFQEMQEKLNVQGKPSRADLWRYQSVQRQNCQCAYCGSPITFSNSEMDHIVPRAGQGSTNTRENLVAVCHRCNQSKGNTPFAIWAKNTSIEGVSVKEAVERTRHWVTDTGMRSTDFKKFTKAVVERFQRATMDEEIDARSMESVAWMANELRSRVAQHFASHGTTVRVYRGSLTAEARRASGISGKLEFLDGVGKSRLDRRHHAIDAAVIAFTSDYVAETLAVRSNLKQSQAHRQEAPQWREFTGKDAEHRATWRVWCQKMEKLSALLTEDLRDDRVVVMSNVRLRLGNGSAHEETIGKLSKVKLGSQLSVSDIDKASSEALWCALTREPDFDPKDGLPANPERHIRVNGTHVYAGDNIGLFPVSAGSIALRGGYAELGSSFHHARVYKITSGKKPAFAMLRVYTIDLLPYRNQDLFSVELKPQTMSMRQAEKKLRDALATGNAEYLGWLVVDDELVVDTSKIATDQVKAVEAELGTIRRWRVDGFFGDTRLRLRPLQMSKEGIKKESAPELSKIIDRPGWLPAVNKLFSEGNVTVVRRDSLGRVRLESTAHLPVTWKVQ

SEQ ID NO: 377 - protein, 1084 aa, Corynebacterium diphtheriae
MKYHVGIDVGTFSVGLAAIEVDDAGMPIKTLSLVSHIHDSGLDPDEIKSAVTRLASSGIARRTRRLYRRKRRRLQQLDKFIQRQGWPVIELEDYSDPLYPWKVRAELAASYIADEKERGEKLSVALRHIARHRGWRNPYAKVSSLYLPDGPSDAFKAIREEIKRASGQPVPETATVGQMVTLCELGTLKLRGEGGVLSARLQQSDHAREIQEICRMQEIGQELYRKIIDVVFAAESPKGSASSRVGKDPLQPGKNRALKASDAFQRYRIAALIGNLRVRVDGEKRILSVEEKNLVFDHLVNLAPKKEPEWVTIAEILGIDRGQLIGTATMTDDGERAGARPPTHDTNRSIVNSRIAPLVDWWKTASALEQHAMVKALSNAEVDDFDSPEGAKVQAFFADLDDDVHAKLDSLHLPVGRAAYSEDTLVRLTRRMLADGVDLYTARLQEFGIEPSWTPPAPRIGEPVGNPAVDRVLKTVSRWLESATKTWGAPERVIIEHVREGFVTEKRAREMDGDMQRRAARNAKLFQEMQEKLNVQGKPSRADLWRYQSVQRQNCQCAYCGSPITFSNSEMDHIVPRAGQGSTNTRENLVAVCHRCNQSKGNTPFAIWAKNTSIEGVSVKEAVERTRHWVTDTGMRSPDFKKFTKAVVERFQRATMDEEIDARSMESVAWMANELRSRVAQHFASHGTTVRVYRGSLTAEARRASGISGKLKFFDGVGKSRLDRRHHAIDAAVIAFTSDYVAETLAVRSNLKQSQAHRQEAPQWREFTGKDAEHRAAWRVWCQKMEKLSALLTEDLRDDRVVVMSNVRLRLGNGSAHKETIGKLSKVKLGSQLSVSDIDKASSEALWCALTREPDFDPKEGLPANPERHIRVNGTHVYAGDNIGLFPVSAGSIALRGGYAELGSSFHHARVYKITSGKKPAFAMLRVYTIDLLPYRNQDLFSVELKPQTMSMRQAEKKLRDALATGNAEYLGWLVVDDELVVDTSKIATDQVKAVEAELGTIRRWRVDGFFSPSKLRLRPLQMSKEGIKKESAPELSKIIDRPGWLPAVNKLFSDGNVTVVRRDSLGRVRLESTAHLPVTWKVQ

SEQ ID NO: 378 - protein, 1084 aa, Corynebacterium diphtheriae
MKYHVGIDVGTFSVGLAAIEVDDAGMPIKTLSLVSHIHDSGLDPDKIKSAVTRLASSGIARRTRRLYRRKRRRLQQLDKFIQRQGWPVIELEDYSDPLYPWKVRAELAASYIADEKERGEKLSVALRHIARHRGWRNPYAKVSSLYLPDEPSDAFKAIREEIKRASGQPVPETATVGQMVTLCELGTLKLRGEGGVLSARLQQSDHAREIQEICRMQEIGQELYRKIIDVVFAAESPKGSASSRVGKDPLQPGKNRALKASDAFQRYRIAALIGNLRVRVDGEKRILSVEEKNLVFDHLVNLAPKKEPEWVTIAEILGIDRGQLIGTATMTDDGERAGARPPTHDTNRSIVNSRIAPLVDWWKTASALEQHAMVKALSNAEVDDFDSPEGAKVQAFFADLDDDVHAKLDSLHLPVGRAAYSEDTLVRLTRRMLADGVDLYTARLQEFGIEPSWTPPAPRIGEPVGNPAVDRVLKTVSRWLKSATKTWGAPERVIIEHVREGFVTEKRAREMDGDMRRRAARNAKLFQEMQEKLNVQGKPSRADLWRYQSVQRQNCQCAYCGSPITFSNSEMDHIVPRAGQGSTNTRENLVAVCHRCNQSKGNTPFAIWAKNTSIEGVSVKEAVERTRHWVTDTGMRSTDFKKFTKAVVERFQRATMDEEIDARSMESVAWMANELRSRVAQHFASHGTTVRVYRGSLTAEARRASGISGKLEFLDGVGKSRLDRRHHAIDAAVIAFTSDYVAETLAVRSNLKQSQAHRQEAPQWREFTGKDAEHRAAWRVWCQKMEKLSALLTEDLRDDRVVVMSNVRLRLGNGSAHEETIGKLSKVKLGSQLSVSDIDKASSEALWCALTREPDFDPKDGLPANPERHIRVNGTHVYAGDNIGLFPVSAGSIALRGGYAELGSSFHHARVYKITSGKKPAFAMLRVYTIDLLPYRNQDLFSVELKPQTMSMRQAEKKLRDALATGNAEYLGWLVVDDELVVDTSKIATDQVKAVEAELGTIRRWRVDGFFGDTRLRLRPLQMSKEGIKKESAPELSKIIDRPGWLPAVNKLFSEGNVTVVRRDSLGRVRLESTAHLPVTWKVQ

SEQ ID NO: 379 - protein, 1084 aa, Corynebacterium diphtheriae
MKYHVGIDVGTFSVGLAAIEVDDAGMPIKTLSLVSHIHDSGLDPDKIKSAVTRLASSGIARRTRRLYRRKRRRLQQLDKFIQRQGWPVIELEDYSDPLYPWKVRAELAASYIADEKERGEKLSVALRHIARHRGWRNPYAKVSSLYLPDEPSDAFKAIREEIKRASGQPVPETATVGQMVTLCELGTLKLRGEGGVLSARLQQSDHAREIQEICRMQEIGQELYRKIIDVVFAAESPKGSASSRVGKDPLQPGKNRALKASDAFQRYRIAALIGNLRVRVDGEKRILSVEEKNLVFDHLVNLAPKKEPEWVTIAEILGIDRGQLIGTATMTDDGERAGARPPTHDTNRSIVNSRIAPLVDWWKTASALEQHAMVKALSNAEVDDFDSPEGAKVQAFFADLDDDVHAKLDSLHLPVGRAAYSEDTLVRLTRRMLADGVDLYTARLQEFGIEPSWTPPAPRIGEPVGNPAVDRVLKTVSRWLESATKTWGAPERVIIEHVREGFVTEKRAREMDGDMRRRAARNAKLFQEMQEKLNVQGKPSRADLWRYQSVQRQNCQCAYCGSPITFSNSEMDHIVPRAGQGSTNTRENLVAVCHRCNQSKGNTPFAIWAKNTSIEGVSVKEAVERTRHWVTDTGMRSTDFKKFTKAVVERFQRATMDEEIDARSMESVAWMANELRSRVAQHFASHGTTVRVYRGSLTAEARRASGISGKLEFLDGVGKSRLDRRHHAIDAAVIAFTSDYVAETLAVRSNLKQSQAHRQEAPQWREFTGKDAEHRAAWRVWCQKMEKLSALLTEDLRDDRVVVMSNVRLRLGNGSAHEETIGKLSKVKLGSQLSVSDIDKASSEALWCALTREPDFDPKDGLPANPERHIRVNGTHVYAGDNIGLFPVSAGSIALRGGYAELGSSFHHARVYKITSGKKPAFAMLRVYTIDLLPYRNQDLFSVELKPQTMSMRQAEKKLRDALATGNAEYLGWLVVDDELVVDTSKIATDQVKAVEAELGTIRRWRVDGFFGDTRLRLRPLQMSKEGIKKESAPELSKIIDRPGWLPAVNKLFSEGNVTVVRRDSLGRVRLESTAHLPVTWKVQ

SEQ ID NO: 380 - protein, 1084 aa, Corynebacterium diphtheriae
MKYHVGIDVGTFSVGLAAIEVDDAGMPIKTLSLVSHIHDSGLDPDKMKSAVTRLASSGIARRTRRLYRRKRRRLQQLDKFIQRQGWPVIELEDYSDPLYPWKVRAELAASYIADEKERGEKLSVALRHIARHRGWRNPYAKVSSLYLPDEPSDAFKSIREEIKRASGQPVPETATVGQMVTLCELGTLKLRGEGGVLSARLQQSDHAREIQEICRMQEIGQELYRKIIDVVFAAESPKGSASSRVGKDPLQPGKNRALKASDSFQRYRIAALISNLRVRVDGEKRILSVEEKNLVFDHLVNLAPKKEPEWVTIAEILGIDRGQLIGTATMTDDGERAGARPPTHDTNRSIVNSRIAPLVDWWKTASALEQHAMVKALSNAEVDDFDSPEGAKVQAFFADLDDDVHAKLDSLHLPVGRAAYSEDTLVRLTRRMLADGVDLYTARLQEFGIEPSWTPPAPRIGEPVGNPAVDRVLKTVSRWLESATKTWGAPERVIIEHVRDGFVTEKRAREMDGDMRRRAARNAKLFQEMQEKLNVQGKPSRADLWRYQSVQRQNCQCAYCGSPITFSNSEMDHIVPRAGQGSTNTRENLVAVCHRCNQSKGNTPFAIWAKNTSIEGVSVKEAVERTRHWVTDTGMRSTDFKKFTKAVVERFQRATMDEEIDARSMESVAWMANELRSRVAQHFASHGTTVRVYRGSLTAEARRASGISGKLEFLDGVGKSRLDRRHHAIDAAVIAFTSDYVAETLAVRSNLKQSQAHRQEAPQWREFTGKDAEHRAAWRVWCQKMEKLSALLTEDLRDDRVVVMSNVRLRLGNGSAHEETIGKLSKVKLGSQLSVSDIDKASSEALWCALTREPDFDPKDGLPANPERHIRVNGTHVYAGDNIGLFPVSAGSIALRGGYAELGSSFHHARVYKITSGKKPAFAMLRVYTIDLLPYRNQDLFSVELKPQTMSMRQAEKKLRDALATGNAEYLGWLVVDDELVVDTSKIATDQVKAVEAELGTIRRWRVDGFFGDTRLRLRPLQMSKEGIKKELAPELSKIIDRPGWLPAVNKLFSEGNVTVVRRDSLGRVRLESTAHLPVTWKVQ

SEQ ID NO: 381 - protein, 1084 aa, Corynebacterium diphtheriae
MKYHVGIDVGTFSVGLAAIEVDDAGMPIKTLSLVSHIHDSGLDPDKMKSAVTRLASSGIARRTRRLYRRKRRRLQQLDKFIQRQGWPVIELEDYSDPLYPWKVRAELAASYIADEKERGEKLSVALRHIARHRGWRNPYAKVSSLYLPDEPSDAFKSIREEIKRASGQPVPETATVGQMVTLCELGTLKLRGEGGVLSARLQQSDHAREIQEICRMQEIGQELYRKIIDVVFAAESPKGSASSRVGKDPLQPGKNRALKASDAFQRYRIAALIGNLRVRVDGEKRILSVEEKNLVFDHLVNLAPKKEPEWVTIAEILGIDRGQLIGTATMTDDGERAGARPPTHDTNRSIVNSRIAPLVDWWKTASALEQHAMVKALSNAEVDDFDSPEGAKVQAFFADLDDDVHAKLDSLHLPVGRAAYSEDTLVRLTRRMLADGVDLYTARLQEFGIEPSWTPPAPRIGEPVGNPAVDRVLKTVSRWLESATKTWGAPERVIIEHVREGFVTEKRAREMDGDMRRRAARNAKLFQEMQEKLNVQGKPSRADLWRYQSVQRQNCQCAYCGSPITFSNSEMDHIVPRAGQGSTNTRENLVAVCHRCNQSKGNTPFAIWAKNTSIEGVSVKEAVERTRHWVTDTGMRSTDFKKFTKAVVERFQRATMDEEIDARSMESVAWMANELRSRVAQHFASHGTTVRVYRGSLTAEARRASGISGKLEFLDGVGKSRLDRRHHAIDAAVIAFTSDYVAETLAVRSNLKQSQAHRQEAPQWREFTGKDAEHRAAWRVWCQKMEKLSALLTEDLRDDRVVVMSNVRLRLGNGSAHEETIGKLSKVKLGSQLSVSDIDKASSEALWCALTREPDFDPKDGLPANPERHIRVNGTHVYAGDNIGLFPVSAGSIALRGGYAELGSSFHHARVYKITSGKKPAFAMLRVYTIDLLPYRNQDLFSVELKPQTMSMRQAEKKLRDALATGNAEYLGWLVVDDELVVDTSKIATDQVKAVEAELGTIRRWRVDGFFGDTRLRLRPLQMSKEGIKKESAPELSKIIDRPGWLPAVNKLFSEGNVTVVRRDSLGRVRLESTAHLPVTWKVQ

SEQ ID NO: 382 - protein, 1084 aa, Corynebacterium diphtheriae
MKYHVGIDVGTFSVGLAAIEVDDAGMPIKTLSLVSHIHDSRLDPDKIKSAVTRLASSGIARRTRRLYRRKRRRLQQLDKFIQRQGWPVIELEDYSDPLYPWKVRAELAASYIADEKERGEKLSVALRHIARHRGWRNPYAKVSSLYLPDEPSDAFKAIREEIKRASGQPVPETATVGQMVTLCELGTLKLRGEGGVLSARLQQSDHAREIQEICRMQEIGQELYRKIIDVVFAAESPKGSASSRVGKDPLQPGKNRALKASDAFQRYRIAALIGNLRVRVDGEKRILSVEEKNLVFDHLVNLAPKKEPEWVTIAEILGIDRGQLIGTATMTDDGERAGARPPTHDTNRSIVNSRIAPLVDWWKTASALEQHAMVKALSNAEVDDFDSPEGAKVQAFFADLDDDVHAKLDSLHLPVGRAAYSEDTLVRLTRRMLADGVDLYTARLQEFGIEPSWTPPAPRIGEPVGNPAVDRVLKTVSRWLESATKTWGAPERVIIEHVREGFVTEKRAREMDGDMRRRAARNAKLFQEMQEKLNIQGKPSRADLWRYQSVQRQNCQCAYCGSPITFSNSEMDHIVPRAGQGSTNTRENLVAVCHRCNQSKGNTPFAIWAKNTSIEGVSVKEAVERTRHWVTDTGMRSTDFKKFTKAVVERFQRVTMDEEIDARSMESVAWMANELRSRVAQHFASRGTTVRVYRGSLTAEARRASGISGKLEFLDGVGKSRLDRRHHAIDAAVIAFTSDYVAETLAVRSNLKQSQAHRQEAPQWREFTGKDAEHRAAWRVWCQKMEKLSALLTEDLRDDRVVVMSNVRLRLGNGSAHEETIGKLSKVKLGSQLSVSDIDKASSEALWCALTREPDFDPKDGLPANPERHIRVNGTHVYAGDNIGLFPVSAGSIALRGGYAELGSSFHHARVYKITSGKKPAFAMLRVYTIDLLPYRNQDLFSVELKPQTMSMRQAEKKLRDALATGNAEYLGWLVVDDELVVDTSKIATDQVKAVEAELGTIRRWRVDGFFGDTRLRLRPLQMSKEGIKKESAPELSKIIDRPGWLPAVNKLFSEGNVTVVRRDSLGRVRLESTAHLPVTWKVQ

SEQ ID NO: 383 - protein, 1069 aa, Corynebacterium matruchotii
MAAIAIDDDGKPTEILSAISLIHDSGVDPDSAKSAATRLATSGIARRTRRLYRRKRKRLAKLDKFISSQGWPLKEFEKYEDPFYPWRVRAELATTAITDQQELGEKLSIALRHIARHRGWRNPYSKVTALYTVTEPSDAFLAMQEECAKQLGRTIPETITVGQLVTGMNLGKTRLRGENSLLAARPRQSDNANEIHTIAKVQGLSNELVRQIIDHVFAAESPKGSAAEQVGKDPLQPTKKRALKASDAFQQYRIAALIGNLRIRGGKGNRRLTTEETRLVFDYLRSLPAKQEPTWQLVAEQLKIDRGNLVGTAIMTDDGERAGAKPPVHDTNRIMENTKIKPLATWWKSADADARAAMVKALSNAEVDDFDSQAGAQVQEFFFGISDEDQEKLDGLHLPIGRAAYSEDTLDRLTKRMIGEGMDLYEARQAEFKISNDWAPPAPEIGERVGNPAVDRVLKATARWLNAAERQWGAPKSVNIEHVRAAFMSESSARELDRDNQQRAKRNVKVVAEMQEKLGIEGRPSRADVWRFQSIQRQNGKCAYCGAEISFKNSEMDHIIPQVGEGSTNTRDNLVAVCRECNSSKSNIAFAVWAENTSRPGVSVQKAIERTHHWVTDSGLRKPEFDKFRKQVCDRLRRKATDEPIDARSLESVAWMANELRSRIAQKFKDGDTKVRVYKGALTAEARRASGISGKLEFVDGKGKSRLDRRHHAVDAAVVAFTSNYVAETLALRSNMKFDQELRRKAPQWREFTGSDHVHQVEWTKWKYRMQALAELLNNALVQDRIVVMHNLRLRLGNGAAHEDTIGKLTRLKVGDAISTTDIDRASSEALWCALTRDPDYDPKTGLPENPNRTIRIHGTHLTASDEITVFPVAAASIPIRDGFAKLGSNYHHVRLFRVPSGKKYKYCLMQVYTVDLLKFRKEDLFTVELKPQTISVRTCEALLRKALANGTAEYLGWLVSDDELLIDTSSFDTPGIVKLREEYGPVNRWRLAGLTSVTRLNLRPLYLSKEGLKPNVNPEIKKIIDNRSWIITVNKLFSSGHVKIIRRDALGRPRLHSAAHLPICWEVK

SEQ ID NO: 384 - protein, 210 aa, Diplosphaera colitermitum
MSDILDKPIVLSLNRAWQVIGHRTVKQALVALNGGNADLPPALGLDIAYPKFDDGAWNFDRPLFLNPLPWSEWIELPVRDFDFAITTPRLRIRVPTVIVATQFAKMPVRIPRLTREAIFERDGGVCQYTGEHVGKHGGNLDHVVPRDRGGRDSFENLVWAKREINSLKANRLPHEAGLRLLRRPKAPAPLPASMTIREARHPDWRHFLTP

SEQ ID NO: 385 - protein, 1332 aa, Dolosigranulum pigrum
MQKNYTIGLDIGTNSVGWAVMKDDYTLIRKRMKVLGNTDIKKIKKNFWGVRLFDEGETAKETRLKRGTRRRYQRRRNRLIYLQDIFQQPMLAIDENFFHRLDDSFFVPDDKSYDRHPIFGSLEEEVAYHNTYPTIYHLRKHLADNPEKADLRLVYTALAHIVKYRGHFLIEGELNTENTSISETFEQFLDTYSDIFKEQLVGDISKVEEILSSKQSRSRKHEQIMALFPNENKLGNFGRFMMLIVGNTSNFKPVFDLDDEYKLKLSDETYEEDLDTLLGMTDDVFLDVFMAAKNVYDAVEMSAIISTDTGNSKAVLSNQMINFYDEHKVDLAQLKQFFKTHLPDKYYECFSDPSKNGYAGYIDGKTNQEDFYKYIEKVMKTIKSDKKDYFLDKIDREVFLRKQRSFYNSVIPHQIHLQEMQAILDRQSQYYPFLAENRDKIESLVTFRIPYYVGPLTVSDQSEFAWMERQSDEPIRPWNFDEIVNKERSAEKFIERMTNMDTYLLEEKVLPKRSLLYQTFEVYNELTKVRYTNEQGKTEKLNRQQKAEIIETLFKQKNRVREKDIANYLEQYGYVDGTDIKGVEDKFNASLSTYNDLAKIDGAKAYLDDPEYADVWEDIIKILTIFEDKAMRKKQLQTYSDTLSPEILKKLERKHYTGWGRFSKKLINGLRDEGSNKTILDYLKSDEGSSGPTNRNFMQLIRDNTLSFKKKIEDAQTIEDTTHIYDTVAELPGSPAIKKGIRQALKIVEEIIDIIGYEPENIVVEMARESQTTKKGKDLSKERLEKLTEAIKEFDGPSDVKVKDLKNENLRNDRLYLYYLQNGRDMYTNEPLDINNLSKYDIDHIIPQSFTTDNSIDNKVLVSRTKNQGNKSDDVPSINIVHKMKPFWRQLHKAGLISDRKFKNLTKAEHGGLTEADRAHFLNRQLVETRQITKHVANLLDSQYNTAEEQRINIVLLKSSMTSRFRKEFKLYKVREINDYHHGHDAYLNAVVATTIMKVYPNLKPQFVYGQYKKTSMFKEEKATARKHFYSNITKFFKKEKVVNEETGEILWDTERHLSTIKRVLSWKQMNIVKKVEKQKGQLWKETIYPKGDSSKLIPVKEGMDPQKYGGLSQVSEAFAVVITHEKGKKKQLKSDLISIPIVDQKAYEQHPTAYLEEAGYNNPTVLHELFKYQLFELEDGSRRMIASAKEFQKGNQMVLPLELVELLYHANRYDKVKFPDSIEYVHDNLAKFDDLLEYVIDFSNKYINADKNVQKIQKIYKEHGTEDVELTVESFVNLMTFTAMGAPATFKFYGESITRSRYTSITEFRGSTLIFQSITGLYETRYKLEDN

SEQ ID NO: 386 - protein, 921 aa, Enterococcus faecalis
MIPHQIHLAELQAIIHRQAAYYPFLKENQEKIEQLVTFRIPYYVGPLSKGDASTFAWLKRQSEEPIRPWNLQETVDLDQSATAFIERMTNFDTYLPSEKVLPKHSLLYEKFMVFNELTKISYTDDRGIKANFSGKEKEKIFDYLFKTRRKVKKKDIIQFYRNEYNTEIVTLSGLEEDQFNASFSTYQDLLKCGLTRAELDHPDNAEKLEDIIKILTIFEDRQRIRTQLSTFKGQFSAEVLKKLERKHYTGWGRLSKKLINGIYDKESGKTILGYLIKDDGVSKHYNRNFMQLINDSQLSFKNAIQKAQSSEHEETLSETVNELAGSPAIKKGIYQSLKIVDELVAIMGYAPKRIVVEMARENQTTSTGKRRSIQRLKIVEKAMAEIGSNLLKEQPTTNEQLRDTRLFLYYMQNGKDMYTGDELSLHRLSHYDIDHIIPQSFMKDDSLDNLVLVGSTENRGKSDDVPSKEVVKDMKAYWEKLYAAGLISQRKFQRLTKGEQGGLTLEDKAHFIQRQLVETRQITKNVAGILDQRYNANSKEKKVQIITLKASLTSQFRSIFGLYKVREVNDYHHGQDAYLNCVVATTLLKVYPNLAPEFVYGEYPKFQTFKENKATAKAIIYTNLLRFFTEDEPRFTKDGEILWSNSYLKTIKKELNYHQMNIVKKVEVQKGGFSKESIKPKGPSNKLIPVKNGLDPQKYGGFDSPIVAYTVLFTHEKGKKPLIKQEILGITIMEKTRFEQNRILFLEEKGFLRPRVLMKLPKYTLYEFPEGRRRLLASAKEAQKGNQMVLPEHLLTLLYHAKQCLLPNQSESLTYVEQHQPEFQEILERVVDFAEVHTLAKSKVQQIVKLFEANQTADVKEIAASFIQLMQFNAMGAPSTFKFFQKDIERARYTSIKEIFDATIIYQSTTGLYETRRKVVD

SEQ ID NO: 387 - protein, 1337 aa, Enterococcus faecalis; identical to SEQ ID NO: 110

SEQ ID NO: 388 - protein, 1337 aa, Enterococcus faecalis
MKKDYVIGLDIGTNSVGWAVMTEDYQLVKKKMPIYGNTEKKKIKKNFWGVRLFEEGHTAEDRRLKRTARRRISRRRNRLRYLQAFFEEAMTALDENFFARLQESFLVPEDKKWHRHPIFAKLEDEVAYHETYPTIYHLRKKLADSSEQADLRLIYLALAHIVKYRGHFLIEGKLSTENISVKEQFQQFMIIYNQTFVNGESRLVSAPLPESVLIEEELTEKASRTKKSEKVLQQFPQEKANGLFGQFLKLMVGNKADFKKVFGLEEEAKITYASESYEEDLEGILAKVGDEYSDVFLAAKNVYDAVELSTILADSDKKSHAKLSSSMIVRFTEHQEDLKNFKRFIRENCPDEYDNLFKNEQKDGYAGYITHAGKVSQLKFYQYVKKIIQDIAGAEYFLEKIAQENFLRKQRTFDNGVIPHQIHLAELQAIIHRQAAYYPFLKENQEKIEQLVTFRIPYYVGPLSKGDANTFAWLKRQSEEPIRPWNLQETVDLDQSATAFIERMTNFDTYLPSEKVLPKHSLLYEKFMVFNELTKISYTDDRGIKANFSGKEKEKIFDYLFKTRRKVKKKDIIQFYRNEYNTEIVTLSGLEEDQFNASFSTYQDLLKCGLTRAELDHPDNAEKLEDIIKILTIFEDRQRIRTQLSTFKGQFSAEVLKKLERKHYTGWGRLSKKLINGIYDKESGKTILDYLIKDDGVSKHYNRNFMQLINDSQLSFKNAIQKAQSSEHEETLSETVNELAGSPAIKKGIYQSLKIVDELVAIMGYAPKRIVVEMARENQTTSTGKRRSIQRLKIVEKAMAEIGSNLLKEQPTTNEQLRDTRLFLYYMQNGKDMYTGDELSLHRLSHYDIDHIIPQSFMKDDSLDNLVLVGSTENRGKSDDVPSKEVVKDMKAYWEKLYAAGLISQRKFQRLTKGEQGGLTLEDKAHFIQRQLVETRQITKNVAGILDQRYNAKSKEKKVQIITLKASLTSQFRSIFGLYKVREVNDYHHGQDAYLNCVVATTLLKVYPNLAPEFVYGEYPKFQTFKENKATAKAIIYTNLLRFFTEDEPRFTKDGEILWSNSYLKTIKKELNYHQMNIVKKVEVQKGGFSKESIKPKGPSNKLIPVKNGLDPQKYGGFDSPIVAYTVLFTHEKGKKPLIKQEILGITIMEKTRFEQNPILFLEEKGFLRPRVLMKLPKYTLYQFPEGRRRLLASAKEAQKGNQMVLPEHLLTLLYHAKQCLLPNQSESLAYVEQHQPEFQEILERVVDFAEVHTLAKSKVQQIVKLFEANQTADVKEIAASFIQLMQFNAMGAPSTFKFFQKDIERARYTSIKEIFDATIIYQSTTGLYETRRKVVD

SEQ ID NO: 389 - protein, 1337 aa, Enterococcus faecalis
MKKDYVIGLDIGTNSVGWAVMTEDYQLVKKKMPIYGNTEKKKIKKNFWGVRLFEEGHTAEDRRLKRTARRRISRRRNRLRYLQAFFEEAMTALDENFFARLQESFLVPEDKKWHRHPIFAKLEDEVAYHETYPTIYHLRKKLADSSEQADLRLIYLALAHIVKYRGHFLIEGKLSTENISVKEQFQQFMIIYNQTFVNGESRLVSTPLPESVLIEEELTEKASRTKKSEKVLQQFPQEKANGLFGQFLKLMVGNKADFKKVFGLEEEAKITYASESYEEDLEGILAKVGDEYSDVFLAAKNVYDAVELSTILADSDKKSHAKLSSSMIVRFTEHQEDLKNFKRFIRENCPDEYDNLFKNEQKDGYAGYITHAGKVSQLKFYQYVKKIIQDIAGAEYFLEKIAQENFLRKQRTFDNGVIPHQIHLAELQAIIHRQAAYYPFLKENQEKIEQLVTFRIPYYVGPLSKGDASTFAWLKRQSEEPIRPWNLQETVDLDQSATAFIERMTNFDTYLPSEKVLPKHSLLYEKFMVFNELTKISYTDDRGIKANFSGKEKEKIFDYLFKTRRKVKKKDIIQFYRNEYNTEIVTLSGLEEDQFNASFSTYQDLLKCGLTRAELDHPDNAEKLEDIIKILTIFEDRQRIRTQLSTFKGQFSAEVLKKLERKHYTGWGRLSKKLINGIYDKESGKTILDYLVKDDGVSKHYNRNFMQLINDSQLSFKNAIQKAQSSEHEETLSETVNELAGSPAIKKGIYQSLKIVDELVAIMGYAPKRIVVEMARENQTTSTGKRRSIQRLKIVEKAMAEIGSNLLKEQPTTNEQLRDTRLFLYYMQNGKDMYTGDELSLHRLSHYDIDHIIPQSFMKDDSLDNLVLVGSTENRGKSDDVPSKEVVKDMKAYWEKLYAAGLISQRKFQRLTKGEQGGLTLEDKAHFIQRQLVETRQITKNVAGILDQRYNAKSKEKKVQIITLKASLTSQFRSIFGLYKVREVNDYHHGQDAYLNCVVATTLLKVYPNLAPEFVYGEYPKFQTFKENKATAKAIIYTNLLRFFTEDEPRFTKDGEILWSNSYLKTIKKELNYHQMNIVKKVEVQKGGFSKESIKPKGPSNKLIPVKNGLDPQKYGGFDSPIVAYTVLFTHEKGKKPLIKQEILGITIMEKTRFEQNPILFLEEKGFLRPRVLMKLPKYTLYEFPEGRRRLLASAKEAQKGNQMVLPEHLLTLLYHAKQCLLPNQSESLAYVEQHQPEFQEILERVVDFAEVHTLAKSKVQQIVKLFEANQTADVKEIAASFIQLMQFNAMGAPSTFKFFQKDIERARYTSIKEIFDATIIYQSTTGLYETRRKVVD

SEQ ID NO: 390 - protein, 1337 aa, Enterococcus faecalis
MKKDYVIGLDIGTNSVGWAVMTEDYQLVKKKMPIYGNTEKKKIKKNFWGVRLFEEGHTAEDRRLKRTARRRISRRRNRLRYLQAFFEEAMTDLDENFFARLQESFLVPEDKKWHRHPIFAKLEDEVAYHETYPTIYHLRKKLADSSEQADLRLIYLALAHIVKYRGHFLIEGKLSTENISVKEQFQQFMIIYNQTFVNGESRLVSAPLPESVLIEEELTEKASRTKKSEKVLQQFPQEKANGLFGQFLKLMVGNKADFKKVFGLEEEAKITYASESYEEDLEGILAKVGDEYSDVFLAAKNVYDAVELSTILADSDKKSHAKLSSSMIVRFTEHQEDLKKFKRFIRENCPDEYDNLFKNEQKDGYAGYIAHAGKVSQLKFYQYVKKIIQDIAGAEYFLEKIAQENFLRKQRTFDNGVIPHQIHLAELQAIIHRQAAYYPFLKENQEKIEQLVTFRIPYYVGPLSKGDASTFAWLKRQSEEPIRPWNLQETVDLDQSATAFIERMTNFDTYLPSEKVLPKHSLLYEKFMVFNELTKISYTDDRGIKANFSGKEKEKIFDYLFKTRRKVKKKDIIQFYRNEYNTEIVTLSGLEEDQFNASFSTYQDLLKCGLTRAELDHPDNAEKLEDIIKILTIFEDRQRIRTQLSTFKGQFSAEVLKKLERKHYTGWGRLSKKLINGIYDKESGKTILGYLIKDDGVSKHYNRNFMQLINDSQLSFKNAIQKAQSSEHEETLSETVNELAGSPAIKKGIYQSLKIVDELVAIMGYAPKRIVVEMARENQTTSTGKRRSIQRLKIVEKAMAEIGSNLLKEQPTTNEQLRDTRLFLYYMQNGKDMYTGDELSLHRLSHYDIDHIIPQSFMKDDSLDNLVLVGSTENRGKSDDVPSKEVVKDMKAYWEKLYAAGLISQRKFQRLTKGEQGGLTLEDKAHFIQRQLVETRQITKNVAGILDQRYNANSKEKKVQIITLKASLTSQFRSIFGLYKVREVNDYHHGQDAYLNCVVATTLLKVYPNLAPEFVYGEYPKFQTFKENKATAKAIIYTNLLRFFTEDEPRFTKDGEILWSNSYLKTIKKELNYHQMNIVKKVEVQKGGFSKESIKPKGPSNKLIPVKNGLDPQKYGGFDSPIVAYTVLFTHEKGKKPLIKQEILGITIMEKTRFEQNPILFLEEKGFLRPRVLMKLPKYTLYEFPEGRRRLLASAKEAQKGNQMVLPEHLLTLLYHAKQCLLPNQSESLAYVEQHQPEFQEILERVVDFAEVHTLAKSKVQQIVKLFEANQTADVKEIAASFIQLMQFNAMGAPSTFKFFQKDIERARYTSIKEIFDATIIYQSTTGLYETRRKVVD

SEQ ID NO: 391 - protein, 936 aa, Enterococcus faecalis
MKKDYVIGLDIGTNSVGWAVMTEDYQLVKKKMPIYGNTEKKKIKKNFWGVRLFEEGHTAEDRRLKRTARRRISRRRNRLRYLQAFFEEAMTDLDENFFARLQESFLVPEDKKWHRHPIFAKLEDEVAYHETYPTIYHLRKKLADSSEQADLRLIYLALAHIVKYRGHFLIEGKLSTENISVKEQFQQFMIIYNQTFVNGESRLVSAPLPESVLIEEELTEKASRTKKSEKVLQQFPQEKANGLFGQFLKLMVGNKADFKKVFGLEEEAKITYASESYEEDLEGILAKVGDEYSDVFLAAKNVYDAVELSTILADSDKKSHAKLSSSMIVRFTEHQEDLKKFKRFIRENCPDEYDNLFKNEQKDGYAGYIAHAGKVSQLKFYQYVKKIIQDIAGAEYFLEKIAQENFLRKQRTFDNGVIPHQIHLAELQAIIHRQAAYYPFLKENQEKIEQLVTFRIPYYVGPLSKGDASTFAWLKRQSEEPIRPWNLQETVDLDQSATAFIERMTNFDTYLPSEKVLPKHSLLYEKFMVFNELTKISYTDDRGIKANFSGKEKEKIFDYLFKTRRKVKKKDIIQFYRNEYNTEIVTLSGLEEDQFNASFSTYQDLLKCGLTRAELDHPDNAEKLEDIIKILTIFEDRQRIRTQLSTFKGQFSAEVLKKLERKHYTGWGRLSKKLINGIYDKESGKTILGYLIKDDGVSKHYNRNFMQLINDSQLSFKNAIQKAQSSEHEETLSETVNELAGSPAIKKGIYQSLKIVDELVAIMGYAPKRIVVEMARENQTTSTGKRRSIQRLKIVEKAMAEIGSNLLKEQPTTNEQLRDTRLFLYYMQNGKDMYTGDELSLHRLSHYDIDHIIPQSFMKDDSLDNLVLVGSTENRGKSDDVPSKEVVKDMKAYWEKLYAAGLISQRKFQRLTKGEQGGLTLEDKAHFIQRQLVETR

SEQ ID NO: 392 - protein, 1337 aa, Enterococcus faecalis
MKKDYVIGLDIGTNSVGWAVMTEDYQLVKKKMPIYGNTEKKKIKKNFWGVRLFEEGHTAEDRRLKRTARRRISRRRNRLRYLQAFFEEAMTDLDENFFARLQESFLVPEDKKWHRHPIFAKLEDEVAYHETYPTIYHLRKKLADSSEQADLRLIYLALAHIVKYRGHFLIEGKLSTENISVKEQFQQFMIIYNQTFVNGESRLVSAPLPESVLIEEELTEKASRTKKSEKVLQQFPQEKANGLFGQFLKLMVGNKADFKKVFGLEEEAKITYASESYEEDLEGILAKVGDEYSDVFLAAKNVYDAVELSTILADSDKKSHAKLSSSMIVRFTEHQEDLKKFKRFIRENCPDEYDNLFKNEQKDGYAGYIAHAGKVSQLKFYQYVKKIIQDIAGAEYFLEKIAQENFLRKQRTFDNGVIPHQIHLAELQAIIHRQAAYYPFLKENQEKIEQLVTFRIPYYVGPLSKGDASTFAWLKRQSEEPIRPWNLQETVDLDQSATAFIERMTNFDTYLPSEKVLPKHSLLYEKFMVFNELTKISYTDDRGIKANFSGKEKEKIFDYLFKTRRKVKKKDIIQFYRNEYNTEIVTLSGLEEDQFNASFSTYQDLLKCGLTRAELDHPDNAEKLEDIIKILTIFEDRQRIRTQLSTFKGQFSAEVLKKLERKHYTGWGRLSKKLINGIYDKESGKTILDYLVKDDGVSKHYNRNFMQLINDSQLSFKNAIQKAQSSEHEETLSETVNELAGSPAIKKGIYQSLKIVDELVAIMGYAPKRIVVEMARENQTTSTGKRRSIQRLKIVEKAMAEIGSNLLKEQPTTNEQLRDTRLFLYYMQNGKDMYTGDELSLHRLSHYDIDHIIPQSFMKDDSLDNLVLVGSTENRGKSDDVPSKEVVKDMKAYWEKLYAAGLISQRKFQRLTKGEQGGLTLEDKAHFIQRQLVETRQITKNVAGILNQRYNANSKEKKVQIITLKASLTSQFRSIFGLYKVREVNDYHHGQDAYLNCVVATTLLKVYPNLAPEFVYGEYPKFQTFKENKATAKAIIYTNLLRFFTEDEPRFTKDGEILWSNSYLKTIKKELNYHQMNIVKKVEVQKGGFSKESIKPKGPSNKLIPVKNGLDPQKYGGFDSPVVAYTVLFTHEKGKKPLIKQEILGITIMEKTRFEQNPILFLEEKGFLRPRVLMKLPKYTLYEFPEGRRRLLASAKEAQKGNQMVLPEHLLTLLYHAKQCLLPNQSESLAYVEQHQPEFQEILERVVDFAEVHTLAKSKVQQIVKLFEANQTADVKEIAASFIQLMQFNAMGAPSTFKFFQKDIERARYTSIKEIFDATIIYQSTTGLYETRRKVVD

SEQ ID NO: 393 - protein, 1337 aa, Enterococcus faecalis
MKKDYVIGLDIGTNSVGWAVMTEDYQLVKKKMPIYGNTEKKKIKKNFWGVRLFEEGHTAEDRRLKRTARRRISRRRNRLRYLQAFFEEAMTDLDENFFARLQESFLVPEDKKWHRHPIFAKLEDEVAYHETYPTIYHLRKKLADSSEQADLRLIYLALAHIVKYRGHFLIEGKLSTENISVKEQFQQFMIIYNQTFVNGESRLVSAPLPESVLIEEELTEKASRTKKSEKVLQQFPQEKANGLFGQFLKLMVGNKADFKKVFGLEEEAKITYASESYEEDLEGILAKVGDEYSDVFLAAKNVYDAVELSTILADSDKKSHAKLSSSMIVRFTEHQEDLKKFKRFIRENCPDEYDNLFKNEQKDGYAGYIAHAGKVSQLKFYQYVKKIIQDIAGAEYFLEKIAQENFLRKQRTFDNGVIPHQIHLAELQAIIHRQAAYYPFLKENQEKIEQLVTFRIPYYVGPLSKGDASTFAWLKRQSEEPIRPWNLQETVDLDQSATAFIERMTNFDTYLPSEKVLPKHSLLYEKFMVFNELTKISYTDDRGIKANFSGKEKEKIFDYLFKTRRKVKKKDIIQFYRNEYNTEIVTLSGLEEDQFNASFSTYQDLLKCGLTRAELDHPDNAEKLEDIIKILTIFEDRQRIRTQLSTFKGQFSAEVLKKLERKHYTGWGRLSKKLINGIYDKESGKTILGYLIKDDGVSKHYNRNFMQLINDSQLSFKNAIQKAQSSEHEETLSETVNELAGSPAIKKGIYQSLKIVDELVAIMGYAPKRIVVEMARENQTTSTGKRRSIQRLKIVEKAMAEIGSNLLKEQPTTNEQLRDTRLFLYYMQNGKDMYTGDELSLHRLSHYDIDHIIPQSFMKDDSLDNLVLVGSTENLGKSDDVPSKEVVKDMKAYWEKLYAAGLISQRKFQRLTKGEQGGLTLEDKAHFIQRQLVETRQITKNVAGILDQRYNANSKEKKVQIITLKASLTSQFRSIFGLYKVREVNDYHHGQDAYLNCVVATTLLKVYPNLAPEFVYGEYPKFQTFKENKATAKAIIYTNLLRFFTEDEPRFTKDGEILWSNSYLKTIKKELNYHQMNIVKKVEVQKGGFSKESIKPKGPSNKLIPVKNGLDPQKYGGFDSPIVAYTVLFTHEKGKKPLIKQEILGITIMEKTRFEQNPILFLEEKGFLRPRVLMKLPKYTLYEFPEGRRRLLASAKEAQKGNQMVLPEHLLTLLYHAKQCLLPNQSESLAYVEQHQPEFQEILERVVDFAEVHTLAKSKVQQIVKLFEANQTADVKEIAASFIQLMQFNAMGAPSTFKFFQKDIERARYTSIKEIFDATIIYQSTTGLYETRRKVVD

SEQ ID NO: 394 - protein, 1337 aa, Enterococcus faecalis
MKKDYVIGLDIGTNSVGWAVMTEDYQLVKKKMPIYGNTEKKKIKKNFWGVRLFEEGHTAEDRRLKRTARRRISRRRNRLRYLQAFFEEAMTDLDENFFARLQESFLVPEDKKWHRHPIFAKLEDEVAYHETYPTIYHLRKKLADSSEQADLRLIYLALAHIVKYRGHFLIEGKLSTENTSVKEQFQQFMVIYNQTFVNGESRLVSAPLPESVLIEEELTEKASRTKKSEKVLQQFPQEKANGLFGQFLKLMVGNKADFKKVFGLEEEAKITYASESYEEDLEGILAKVGDEYSDVFLAAKNVYDAVELSTILADSDKKSHAKLSSSMIVRFTEHQEDLKKFKRFIRENCPDEYDNLFKNEQKDGYAGYIAHAGKVSQLKFYQYVKKIIQDIAGAEYFLEKIAQENFLRKQRTFDNGVIPHQIHLAELQAIIHRQAAYYPFLKENQEKIEQLVTFRIPYYVGPLSKGDASTFAWLKRQSEEPIRPWNLQETVDLDQSATAFIERMTNFDTYLPSEKVLPKHSLLYEKFMVFNELTKISYTDDRGIKANFSGKEKEKIFDYLFKTRRKVKKKDIIQFYRNEYNTEIVTLSGLEEDQFNASFSTYQDLLKCGLTRAELDHPDNAEKLEDIIKILTIFEDRQRIRTQLSTFKGQFSAEVLKKLERKHYTGWGRLSKKLINGIYDKESGKTILDYLVKDDGVSKHYNRNFMQLINDSQLSFKNAIQKAQSSEHEETLSETVNELAGSPAIKKGIYQSLKIVDELVAIMGYAPKRIVVEMARENQTTSTGKRRSIQRLKIVEKAMAEIGSNLLKEQPTTNEQLRDTRLFLYYMQNGKDMYTGDELSLHRLSHYDIDHIIPQSFMKDDSLDNLVLVGSTENRGKSDDVPSKKVVKKMKAYWEKLYAAGLISQRKFQRLTKGEQGGLTLEDKAHFIQRQLVETRQITKNVAGILDQRYNAKSKEKKVQIITLKASLTSQFRSIFGLYKVREVNDYHHGQDAYLNCVVATTLLKVYPNLAPEFVYGEYPKFQAFKENKATAKTIIYTNLMRFFTEDEPRFTKDSEILWSNSYLKTIKKELNYHQMNIVKKVEVQKGGFSKESIKPKGPSNKLIPVKNGLDPQKYGGFDSPVVAYTVLFTHEKGKKPLIKQEILGITIMEKTRFEQNPILFLEEKGFLRPRVLMKLPKYTLYEFPEGRRRLLASAKEAQKGNQMVLPEHLLTLLYHAKQCLLPNQSESLAYVEQHQPEFQEILERVVDFAEVHTLAKSKVQQIVKLFEANQTADVKEIAASFIQLMQFNAMGAPSTFKFFQKDIERARYTSIKEIFDATIIYQSTTGLYETRRKVVD

SEQ ID NO: 395 - protein, 1150 aa, Enterococcus faecalis
MYSIGLDLGISSVGWSVIDERTGNVIDLGVRLFSAKNSEKNLERRTNRGGRRLIRRKTNRLKDAKKILAAVGFYEDKSLKNSCPYQLRVKGLTEPLSKGEIYKVTLHILKKRGISYLDEDDTEAAKESQDYKEQVRENAQLLTKYTPGQIQLQRLKENNRVKTGINAQGNYQLNVFKVSAYANELATILKTQQAFYPNELTDDWIALFVQPGIAEEAGLIYRKRPYYHGPGNEANNSPYGRWSDFKKTGQPATNIFDKLIGKDFQGELRASGLSLSAQQYNLLNDLTNLKIDGEIPLSPEQKEYILAELMTKEFTRFGVNDVVKLLGVKKERLSGWRLDKKGKPEIHTLKGYRNWRKIFAESGIDLAMLPTETIDCLAKILTLNTEREGIENTLAFELPELAESVKLLVLDRYKELSQSVSTQAWHRFSLKTLHLLIPELMNATSEQNTLLEQFQLKSDVRKRYSEYKKLPTKDVLTEIYNPTVNKTVSQAFKVIDALLVKYGKEQIRYITIEMPRDDNEEDEKKRIKELHAKNSQRKNDSQSYFMQKSGWSQEKFQTTIQKNRRFLAKLLYYYEQDGICAYTGLSISPELLVSDSTEIDHIIPISISLDDSINNKVLVLSKANQVKGQQTPYDAWMDGSFKKINGKFSNWDDYQKWVESRHFSHKKENNLLETRNIFDSEQVEKFLARNLNDTRYASRLVLNTLQSFFANQETKVRVVNGSFTHTLRKKWGADLDKTRETHHHHAVDATLCAVTPFVKVSRYHYAVKEETGEKVMREIDFETGEIVDEMSYREFKKSKKYERKTYQVKWPNFREQLKPVNLHPRIKFSHQVDRKANRKLSDATIYSVREKTEVKTLKSGKQKITTDEYTIGKIKDIYTVDGWEAFKKKQDKLLMKDLDEKTYERLLSIAETTPDFQEVEEKNGKVKRVKRSPFAVYCEENDIPAIRKYAKKNNGPLIRSLKYYDGKLNKHINITKDSQGRPVEKTKNGRKVTLQSLKPYRYDIYQDLETKAYYTVQLYYSDLRFVEGKYGITEKEYMKKVAEQTKGQVVRFCFSLQKNDGLEIEWKDSQRYDVRFYNFQSANSINFKGLEQEMMPAENQFKQKPYNNGAINLNIAKYGKEGKKLRKFNTDILGKKHYLYYEKEPKNIIK

SEQ ID NO: 396 - protein, 1150 aa, Enterococcus faecalis
MYSIGLDLGISSVGWSVIDERTGNVIDLGVRLFSAKNSEKNLERRTNRGGRRLIRRKTNRLKDAKKILAAVGFYEDKSLKNSCPYQLRVKGLTEPLSKGEIYKVTLHILKKRGISYLDEDDTEAAKESQDYKEQVRKNAQLLTKYTPGQIQLQRLKENNRVKTGINAQGNYQLNVFKVSAYANELATILKTQQAFYPNELTDDWIALFVQPGIAEEAGLIYRKRPYYHGPGNEANNSPYGRWSDFKKTGQPATNIFDRLIGKDFQGELRASGLSLSAQQYNLLNDLTNLKIDGEIPLSPEQKEYILAELMTKEFTRFGVNDVAKLLGVKKERLSGWRLDKKGKPEIHTLKGYRNWRKIFAESGIDLATLPTETIDCLAKVLTLNTEHEGIENTLAFELPELAESVKLLVLDRYKELSQSVSTQAWHRFSLKTLHLLIPELMNATSEQNTLLEQFQLKSDVRKRYSEYKKLPTKDVLTEIYNPTVNKTVSQAFKVIDALLVKYGKEQIRYITIEMPRDDNEEDEKKRIKELHAKNSQRKNDSQSYFMQKSGWSQEKFQTTIQKNRRFLAKLLYYYEQDGICAYTGLSISPELLVSDSTEIDHIIPISISLDDSINNKVLVLSKANQVKGQQTPYDAWMDGSFKKINGKFSNWDDYQKWVESRHFSHKKENNLLETRNIFDSEQVEKFLARNLNDTRYASRLVLNTLQSFFANHETKVRVVNGSFTHTLRKKWGADLDKTRETHHHHAVDATLCAVTPFVKVSRYHYAVKEETGEKVMREIDFETGEIVDEMSYQEFKKSKKYERKTYQVKWPNFREQLKPVNLHPRIKFSHQVDRKANRKLSDATIYSVREKTEVKTLKSGKQKITTDEYTIGKIKDIYTVDGWEAFKKKQDKLLMKDLDEKTYERLLSIAETTPDFQEVEEKNGKVKRVKRSPFAVYCEENDIPAIQKYAKKNNGPLIRSLKYYDGKLNKHINITKDSQGRPVEKTKNGRKVTLQSLKPYRYDIYQDLETKAYYTVQLYYSDLRFVEGKYGITEKEYMKKVAEQTKGQVVRFCFSLQKNDGLEIEWKDSQRYDVRFYNFQSANSINFKGLEQEMMPAENQFKQKPYNNGAINLNIAKYGKEGKKLRKFNTDILGKKHYLYYEKEPKNIIK

SEQ ID NO: 397 - protein, 1150 aa, Enterococcus faecalis
MYSIGLDLGISSVGWSVIDERTGNVIDLGVRLFSAKNSEKNLERRTNRGGRRLIRRKTNRLKDAKKILAAVGFYEDKSLKNSCPYQLRVKGLTEPLSKGEIYKVTLHILKKRGISYLDEDDTEAAKESQDYKEQVRKNAQLLTKYTPGQIQLQRLKENNRVKTGINVQGNYQLNVFKVSAYANELATILKTQQAFYPNELTDDWIALFVQPGIAEEAGLIYRKRPYYHGPGNEANNSPYGRWSDFQKTGEPATNIFDKLIGKDFQGELRASGLSLSAQQYNLLNDLTNLKIDGEVPLSSEQKEYILTELMTKEFTRFGVNDVVKLLGVKKERLSGWRLDKKGKPEIHTLKGYRNWRKIFAEAGIDLATLPTETIDCLAKVLTLNTEREGIENTLAFELPELSESVKLLVLDRYKELSQSISTQSWHRFSLKTLHLLIPELMNATSEQNTLLEQFQLKSDVRKRYSEYKKLPTKDVLAEIYNPTVNKTVSQAFKVIDALLVKYGKEQIRYITIEMPRDDNEEDEKKRIKELHAKNSQRKNDSQSYFMQKSGWSQEKFQTTIQKNRRFLAKLLYYYEQDGICAYTGLPISPELLVSDSTEIDHIIPISISLDDSINNKVLVLSKANQVKGQQTPYDAWMDGSFKKINGKFSNWDDYQKWVESRHFSHKKENNLLETRNIFDSEQVEKFLARNLNDTRYASRLVLNTLQSFFTNQETKVRVVNGSFTHTLRKKWGADLDKTRETHHHHAVDATLCAVTPFVKVSRYHYAVKEETGEKVMREIDFETGEIVNEMSYREFKKSKKYERKTYQVKWPNFREQLKPVNLHPRIKFSHQVDRKANRKLSDATIYSVREKTEVKTLKSGKQKITTDEYTIGKIKDIYTLDGWEAFKKKQDKLLMKDLDEKTYERLLSIAETTPDFQEVEEKNGKVKRVKRSPFAVYCEENDIPAIQKYAKKNNGPLIRSLKYYDGKLNKHINITKDSQGRPVEKTKNGRKVTLQSLKPYRYDIYQDLETKAYYTVQLYYSDLRFVEGKYGITEKEYMKKVAEQTKGQVVRFCFSLQKNDGLEIEWKDSQRYDVRFYNFQSANSINFKGLEQEIMPAENQFKQKPYNNGAINLNIAKYGKEGKKLRKFNTDILGKKHYLFYEKEPKNIIK

SEQ ID NO: 398 - protein, 1150 aa, Enterococcus faecalis; identical to SEQ ID NO: 178

SEQ ID NO: 399 - protein, 1150 aa, Enterococcus faecalis; identical to SEQ ID NO: 179

SEQ ID NO: 400 - protein, 1340 aa, Enterococcus faecium
MKKEYTIGLDIGTNSVGWSVLTDDYRLVSKKMKVAGNTEKSSTKKNFWGVRLFDEGQTAEARRSKRTARRRLARRRQRILELQKIFAPEILKIDEHFFARLNESFLVLDEKKQSRHPVFATIKQEKSYHQTYPTIYHLRQALADSSEKADIRLVYLAMAHLLKYRGHFLIEGELNTENSSVTETFRQFLSTYNQQFSEADDKQTEKLDEAVDCSFVFTEKMSKTKKAETLLKYFPHEKSNGYLSQFIKLMVGNQGNFKNVFGLEEEAKLQFSKETYEEDLEELLEKIGDDYIDLFVQAKNVYDAVLLSEILSDSTKNTRAKLSAGMIRRYDAHKEDLVLLKRFVKENLPKKYRAFFGDNSVNGYAGYIEGHATQEDFYKFVKKELTGIRGSEVFLTKIEQENFLRKQRTFDNGVIPHQIHLTELRAIIANQKKHYPFLKEEQEKLESLLTFKIPYYVGPLAKKQENSPFAWLIRKSEEKIKPWNLPEIVDMEGSAVRFIERMNNTDMYIPHNKVLPKNSLLYQKFSIYNELTKVRYQDERGQMNYFSSIEKKEIFHELFEKNRKVTKKDLQEFLYLKYDIKHAELSGIEKAFNASYTTYHDFLTMSENKREMKQWLEDPELASMFEEIIKTLTVFEDREMIKTRLSHHEATLGKHIIKKLTKKHYTGWGRLSKELIQGIRDKQSNKTILDYLINDDDFPHHRNRNFMQLINDDSLSFKKEIKKAQMITDTENLEEIVKELTGSPAIKKGILQSLKIVDEIVGIMGYEPANIVVEMARENQTTGRGLKSSRPRLKALEESLKDFGSQLLKEYPTDNSSLQKDRLYLYYLQNGRDMYTGAPLDIHRLSDYDIDHIIPRSFTTDNSIDNKVLVSSKENRLKKDDVPSEKVVKKMRSFWYDLYSSKLISKRKLDNLTKIKLTEEDKAGFIKRQLVETRQITKHVAGILHHRFNKAEDTNEPIRKVRIITLKSALVSQFRNRFGIYKVREINEYHHAHDAYLNGVVALALLKKYPQLAPEFVYGEYLKFNAHKANKATVKKEFYSNIMKFFESDTPVCDENGEIFWDKSKSIAQVKKVINHHHMNIVKKTEIQKGGFSKETVEPKKDSSKLLPRKNNWDPAKYGGLGSPNVAYTVAFTYEKGKARKRTNALEGITIMEREAFEQSPVLFLKNKGYEQAEIEMKLPKYALFELENGRKRMVASNKEAQKANSFLLPEHLVTLLYHAKQYDEISHKESFDYVNEHHKEFSEVFARVLEFAGKYTLAEKNIEKLEKIYKENQTDDLAKLASSFVNLMQFNAMGAPADFKFFDVTIPRKRYTSLTEIWQSTIIHQSITGLYETRIRMGK

SEQ ID NO: 401 - protein, 1339 aa, Enterococcus faecium
MKKEYTIGLDIGTNSVGWSVLTDDYRLVSKKMKVAGNTEKSSTKKNFWGVRLFDEGQTAEARRSKRTARRRLARRRQRILELQKIFAPEILKIDEHFFARLNESFLVLDEKKQSRHPVFATIKQEKSYHQTYPTIYHLRQALADSSEKADIRLVYLAMAHLLKYRGHFLIEGELNTENSSVTETFRQFLSTYNQQFSEADDKQTEKLDEAVDCSFVFTEKMSKTKKAETLLKYFPHEKSNGYLSQFIKLMVGNQGNFKNVFGLEEAKLQFSKETYEEDLEELLEKIGDDYIDLFVQAKNVYDAVLLSEILSDSTKNTRAKLSAGMIRRYDAHKEDLVLLKRFVKENLPKKYRAFFGDNSVNGYAGYIEGHATQEDFYKFVKKELTGIRGSEVFLTKIEQENFLRKQRTFDNGVIPHQIHLTELRAIIANQKKHYPFLKEEQEKLESLLTFKIPYYVGPLAKKQENSPFAWLIRKSEEKIKPWNLPEIVDMEGSAVRFIERMINTDMYMPHNKVLPKNSLLYQKFSIYNELTKVRYQDERGQMNYFSSIEKKEIFHELFEKNRKVTKKDLQEFLYLKYDIKHAELSGIEKAFNASYTTYHDFLTMSENKREMKQWLEDPELASMFEEIIKTLTVFEDREMIKTRLSHHEATLGKHIIKKLTKKHYTGWGRLSKELIQGIRDKQSNKTILDYLINDDDFPHHRNRNFMQLINDDSLSFKKEIKKAQMITDTENLEEIVKELTGSPAIKKGILQSLKIVDEIVGIMGYEPANIVVEMARENQTTGRGLKSSRPRLKALEESLKDFGSQLLKEYPTDNSSLQKDRLYLYYLQNGRDMYTGAPLDIHRLSDYDIDHIIPRSFTTDNSIDNKVLVSSKENRLKKDDVPSEKVVKKMRSFWYDLYSSKLISKRKLDNLTKIKLTEEDKAGFIKRQLVETRQITKHVAGILHHRFNKAEDTNEPIRKVRIITLKSALVSQFRNRFGIYKVREINEYHHAHDAYLNGVVALALLKKYPQLAPEFVYGEYLKFNAHKANKATVKKEFYSNIMKFFESDTPVCDENGEIFWDKSKSIAQVKKVINHHHMNIVKKTEIQKGGFSKETVEPKKDSSKLLPRKNNWDPAKYGGLGSPNVAYTVAFTYEKGKARKRTNALEGITIMEREAFEQSPVLFLKNKGYEQAEIEMKLPKYALFELENGRKRMVASNKEAQKANSFLLPEHLVTLLYHAKQYDEISHKESFDYVNEHHKEFSEVFARVLEFAGKYTLAEKNIEKLEKIYKENQTDDLAKLASSFVNLMQFNAMGAPADFKFFDVTIPRKRYTSLTEIWQSTIIHQSITGLYETRIRMGK

SEQ ID NO: 402 - protein, 1340 aa, Enterococcus faecium
MKKEYTIGLDIGTNSVGWSVLTDDYRLVSKKMKVAGNTEKSSTKKNFWGVRLFDEGQTAEARRSKRTARRRLARRRQRILELQKIFAPEILKIDEHFFARLNESFLVLDEKKQSRHPVFATIKQEKSYHQTYPTIYHLRQALADSSEKADIRLVYLAMAHLLKYRGHFLIEGELNTENSSVTETFRQFLSTYNQQFSEADDKQTEKLDEAVDCSFVFTEKMSKTKKAETLLKYFPHEKSNGYLSQFIKLMVGNQGNFKNVFGLEEEAKLQFSKETYEEDLEELLEKIGDDYIDLFVQAKNVYDAVLLSEILSDSTKNTRAKLSAGMIRRYDAHKEDLVLLKRFVKENLPKKYRAFFGDNSVNGYAGYIEGHATQEDFYKFVKKELTGIRGSEVFLTKIEQENFLRKQRTFDNGVIPHQIHLTELRAIIANQKKHYPFLKEEQEKLESLLTFKIPYYVGPLAKKQENSPFAWLIRKSEEKIKPWNLPEIVDMEGSAVRFIERMINTDMYIPHNKVLPKNSLLYQKFSIYNELTKVRYQDERGQMNYFSSIEKKEIFHELFEKNRKVTKKDLQEFLYLKYDIKHAELSGIEKAFNASYTTYHDFLTMSENKREMKQWLEDPELASMFEEIIKTLTVFEDREMIKTRLSHHEATLGKHIIKKLTKKHYTGWGRLSKELIQGIRDKQSNKTILDYLINDDDFPHHRNRNFMQLINDDSLSFKKEIKKAQMITDTENLEEIVKELTGSPAIKKGILQSLKIVDEIVGIMGYEPANIVVEMARENQTTGRGLKSSRPRLKALEESLKDFGSQLLKEYPTDNSSLQKDRLYLYYLQNGRDMYTGAPLDIHRLSDYDIDHIIPRSFTTDNSIDNKVLVSSKENRLKKDDVPSEKVVKKMRSFWYDLYSSKLISKRKLDNLTKIKLTEEDKAGFIKRQLVETRQITKHVAGILHHRFNKAEDTNEPIRKVRIITLKSALVSQFRNRFGIYKVREINEYHHAHDAYLNGVVALALLKKYPQLAPEFVYGEYLKFNAHKANKATVKKEFYSNIMKFFESDTPVCDENGEIFWDKSKSIAQVKKVINHHHMNIVKKTEIQKGGFSKETVEPKKDSSKLLPRKNNWDPAKYGGLGSPNVAYTVAFTYEKGKARKRTNALEGITIMEREAFEQSPVLFLKNKGYEQAEIEMKLPKYALFELENGRKRMVASNKEAQKANSFLLPEHLVTLLYHAKQYDEISHKESFDYVNEHHKEFSEVFARVLEFAGKYTLAEKNIEKLEKIYKENQTDDLAKLASSFVNLMQFNAMGAPADFKFFDVTIPRKRYTSLTEIWQSTIIHQSITGLYETRIRMGK

SEQ ID NO: 403 - protein, 1340 aa, Enterococcus faecium
MKKEYTIGLDIGTNSVGWSVLTDDYRLVSKKMKVAGNTEKSSTKKNFWGVRLFDEGQTAEARRSKRTARRRLARRRQRILELQKIFAPEILKIDEHFFARLNESFLVLDEKKQSRHPVFATIKQEKSYHQTYPTIYHLRQALADSSEKADIRLVYLAMAHLLKYRGHFLIEGELNTENSSVTETFRQFLSTYNQQFSEADDKQTEKLDEAVDCSFVFTEKMSKTKKAETLLKYFPHEKSNGYLSQFIKLMVGNQGNFKNVFGLEEEAKLQFSKETYEEDLEELLEKIGDDYIDLFVQAKNVYDAVLLSEILSDSTKNTRAKLSAGMIRRYDAHKEDLVLLKRFVKENLPKKYRAFFGDNSVNGYAGYIEGHATQEDFYKFVKKELTGIRGSEVFLTKIEQENFLRKQRTFDNGVIPHQIHLTELRAIIANQKKHYPFLKEEQEKLESLLTFKIPYYVGPLAKKQENSPFAWLIRKSEEKIKPWNLPEIVDMEGSAVRFIERMINTDMYMPHNKVLPKNSLLYQKFSIYNELTKVRYQDERGQMNYFSSIEKKEIFHELFEKNRKVTKKDLQEFLYLKYDIKHAELSGIEKAFNASYTTYHDFLTMSENKREMKQWLEDPELASMFEEIIKTLTVFEDREMIKTRLSHHEATLGKHIIKKLTKKHYTGWGRLSKELIQGIRDKQSNKTILDYLINDDDFPHHRNRNFMQLINDDSLSFKKEIKKAQMITDTENLEEIVKELTGSPAIKKGILQSLKIVDEIVGIMGYEPANIVVEMARENQTTGRGLKSSRPRLKALEESLKDFGSQLLKEYPTDNSSLQKDRLYLYYLQNGRDMYTGAPLDIHRLSDYDIDHIIPRSFTTDNSIDNKVLVSSKENRLKKDDVPSEKVVKKMRSFWYDLYSSKLISKRKLDNLTKIKLTEEDKAGFIKRQLVETRQITKHVAGILHHRFNKAEDTNEPIRKVRIITLKSALVSQFRNRFGIYKVREINEYHHAHDAYLNGVVALALLKKYPQLAPEFVYGEYLKFNAHKANKATVKKEFYSNIMKFFESDTPVCDENGEIFWDKSKSIAQVKKVINHHHMNIVKKTEIQKGGFSKETVEPKKDSSKLLPRKNNWDPAKYGGLGSPNVAYTVAFTYEKGKARKRTNALEGITIMEREAFEQSPVLFLKNKGYEQAEIEMKLPKYALFELENGRKRMVASNKEAQKANSFLLPEHLVTLLYHAKQYDEISHKESFDYVNEHHKEFSEVFARVLEFAGKYTLAEKNIEKLEKIYKENQTDDLAKLASSFVNLMQFNAMGAPADFKFFDVTIPRKRYTSLTEIWQSTIIHQSITGLYETRIRMGK

SEQ ID NO: 404 - protein, 1339 aa, Enterococcus faecium
MKKEYTIGLDIGTNSVGWSVLTDDYRLVSKKMKVAGNTEKSSTKKNFWGVRLFDEGQTAEARRSKRTARRRLARRRQRILELQKIFAPEILKIDEHFFARLNESFLVLDEKKQSRHPVFATIKQEKSYHQTYPTIYHLRQALADSSEKADIRLVYLAMAHLLKYRGHFLIEGELNTENSSVTETFRQFLSTYNQQFSEADDKQTEKLDEAVDCSFVFTEKMSKTKKAETLLKYFPHEKSNGYLSQFIKLMVGNQGNFKNVFGLEEAKLQFSKETYEEDLEELLEKIGDDYIDLFVQAKNVYDAVLLSEILSDSTKNTRAKLSAGMIRRYDAHKEDLVLLKRFVKENLPKKYRAFFGDNSVNGYAGYIEGHATQEDFYKFVKKELTGIRGSEVFLTKIEQENFLRKQRTFDNGVIPHQIHLTELRAIIANQKKHYPFLKEEQEKLESLLTFKIPYYVGPLAKKQENSPFAWLIRKSEEKIKPWNLPEIVDMEGSAVRFIERMINTDMYIPHNKVLPKNSLLYQKFSIYNELTKVRYQDERGQMNYFSSIEKKEIFHELFEKNRKVTKKDLQEFLYLKYDIKHAELSGIEKAFNASYTTYHDFLTMSENKREMKQWLEDPELASMFEEIIKTLTVFEDREMIKTRLSHHEATLGKHIIKKLTKKHYTGWGRLSKELIQGIRDKQSNKTILDYLINDDDFPHHRNRNFMQLINDDSLSFKKEIKKAQMITDTENLEEIVKELTGSPAIKKGILQSLKIVDEIVGIMGYEPANIVVEMARENQTTGRGLKSSRPRLKALEESLKDFGSQLLKEYPTDNSSLQKDRLYLYYLQNGRDMYTGAPLDIHRLSDYDIDHIIPRSFTTDNSIDNKVLVSSKENRLKKDDVPSEKVVKKMRSFWYDLYSSKLISKRKLDNLTKIKLTEEDKAGFIKRQLVETRQITKHVAGILHHRFNKAEDTNEPIRKVRIITLKSALVSQFRNRFGIYKVREINEYHHAHDAYLNGVVALALLKKYPQLAPEFVYGEYLKFNAHKANKATVKKEFYSNIMKFFESDTPVCDENGEIFWDKSKSIAQVKKVINHHHMNIVKKTEIQKGGFSEETVEPKKDSSKLLPRKNNWDPAKYGGLGSPNVAYTVAFTYEKGKARKRTNALEGITIMEREAFEQSPVLFLKNKGYEQAEIEMKLPKYALFELENGRKRMVASNKEAQKANSFLLPEHLVTLLYHAKQYDEISHKESFDYVNEHHKEFSEVFARVLEFAGKYTLAEKNIEKLEKIYKENQTDDLAKLASSFVNLMQFNAMGAPADFKFFDVTIPRKRYTSLTEIWQSTIIHQSITGLYETRIRMGK

SEQ ID NO: 405 - protein, 1340 aa, Enterococcus faecium
MKKEYTIGLDIGTNSVGWSVLTDDYRLVSKKMKVAGNTEKSSTKKNFWGVRLFDEGQTAEARRSKRTARRRLARRRQRILELQKIFAPEILKIDEHFFARLNESFLVLDEKKQSRHPVFATIKQEKSYHQTYPTIYHLRQALADSSEKADIRLVYLAMAHLLKYRGHFLIEGELNTENSSVTETFRQFLSTYNQQFSEADDKQTEKLDEAVDCSFVFTEKMSKTKKAETLLKYFPHEKSNGYLSQFIKLMVGNQGNFKNVFGLEEEAKLQFSKETYEEDLEELLEKIGDDYIDLFVQAKNVYDAVLLSEILSDSTKNTRAKLSAGMIRRYDAHKEDLVLLKRFVKENLPKKYRAFFGDNSVNGYAGYIEGHATQEDFYKFVKKELTGIRGSEVFLTKIEQENFLRKQRTFDNGVIPHQIHLTELRAIIANQKKHYPFLKEEQEKLESLLTFKIPYYVGPLAKKQENSPFAWLIRKSEEKIKPWNLPEIVDMEGSAVRFIERMINTDMYIPHNKVLPKNSLLYQKFSIYNELTKVRYQDERGQMNYFSSIEKKEIFHELFEKNRKVTKKDLQEFLYLKYDIKHAELSGIEKAFNASYTTYHDFLTMSENKREMKQWLEDPELASMFEEIIKTLTVFEDREMIKTRLSHHEATLGKHIIKKLTKKHYTGWGRLSKELIQGIRDKQSNKTILDYLINDDDFPHHRNRNCMQLINDDSLSFKKEIKKAQMITDTENLEEIVKELTGSPAIKKGILQSLKIVDEIVGIMGYEPANIVVEMARENQTTGRGLKSSRPRLKALEESLKDFGSQLLKEYPTDNSSLQKDRLYLYYLQNGRDMYTGAPLDIHRLSDYDIDHIIPRSFTTDNSIDNKVLVSSKENRLKKDDVPSEKVVKKMRSFWYDLYSSKLISKRKLDNLTKIKLTEEDKAGFIKRQLVETRQITKHVAGILHHRFNKAEDTNEPIRKVRIITLKSALVSQFRNRFGIYKVREINEYHHAHDAYLNGVVALALLKKYPQLAPEFVYGEYLKFNAHKANKATVKKEFYSNIMKFFESDTPVCDENGEIFWDKSKSIAQVKKVINHHHMNIVKKTEIQKGGFSKETVEPKKDSSKLLPRKNNWDPTKYGGLGSPNVAYTVAFTYEKGKARKRTNALEGITIMEREAFEQSPVLFLKNKGYEQAEIEMKLPKYALFELENGRKRMVASNKEAQKANSFLLPEHLVTLLYHAKQYDEISHKESFDYVNEHHKEFSEVFARVLEFAGKYTLAEKNIEKLEKIYKENQTDDLAKLASSFVNLMQFNAMGAPADFKFFDVTIPRKRYTSLTEIWQSTIIHQSITGLYETRIRMGK

SEQ ID NO: 406 - protein, 892 aa, Enterococcus faecium
MTFKIPYYVGPLAKKQENSPFAWLIRKSEEKIKPWNLPEIVDMEGSAVRFIERMINTDMYMPHNKVLPKNSLLYQKFSIYNELTKVRYQDERGQMNYFSSIEKKEIFHELFEKNRKVTKKDLQEFLYLKYDIKHAELSGIEKAFNASYTTYHDFLTMSENKREMEQWLEDPELASMFEEIIKTLTVFEDREMIKTRLSHHKATLGKHIIKKLTKKHYTGWGRLSKELIQGIRDKQSNKTILDYLINDDDFPHHRNRNFMQLINDDSLSFKKEIKKAQMITDTENLEEIVKELTGSPAIKKGILQSLKIVDEIVGIMGYEPANIVVEMARENQTTGRGLKSSRPRLKALEESLKDFGSQLLKEYPTDNSSLQKDRLYLYYLQNGRDMYTGAPLDIHRLSDYDIDHIIPRSFTTDNSIDNKVLVSSKENRLKKDDVPSEKVVKKMRSFWYDLYSSKLISKRKLDNLTKIKLTEEDKAGFIKRQLVETRQITKHVAGILHHRFNKAEDTNEPIRKVRIITLKSALVSQFRNRFGIYKVREINEYHHAHDAYLNGVIALALLKKYPQLAPEFVYGEYLKFNAHKANKATVKKEFYSNIMKFFESDTPVCDENGEIFWDKSKSIAQVKKVINHHHMNIVKKTEIQKGGFSKETVEPKKDSSKLLPRKNNWDPAKYGGLGSPNVAYTVAFTYEKGKARKRTNALEGITIMEREAFEQSPVLFLKNKGYEQAEIEMKLPKYALFELENGRKRMVASNKEAQKANSFLLPEHLVTLLYHAKQYDEISHKESFDYVNEHHKEFSEVFARVLEFAGKYTLAEKNIEKLEKIYKENQTDDLAKLASSFVNLMQFNAMGAPADFKFFDVTIPRKRYTSLTEIWQSTIIHQSITGLYETRIRMGK

SEQ ID NO: 407 - protein, 1336 aa, Enterococcus hirae
MTKDYTIGLDIGTNSVGWAVLTDDYQLMKRKMSVHGNTEKKKIKKNFWGARLFDEGQTAEFRRTKRTNRRRLARRKYRLSKLQDLFAEELCKQDDCFFVRLEESFLVPEEKQYKPASIFPTLEEEKEYYQKYPTIYHLRQKLVDSTEKEDLRLVYLALAHLLKYRGHFLFEGDLDTENTSIEESFRVFLEQYSKQSDQPLIVHQPVLTILTDKLSKTKKVEEILKYYPTEKINSFFAQCLKLIVGNQANFKRIFDLEAEVKLQFSKETYEEDLESLLEKIGDEYLDIFLQAKKVHDAILLSEIISSTVKHTKAKLSSGMVERYERHKADLAKFKQFVKENVPQKATVFFKDTTKNGYAGYIKGKTTQEEFYKFVKKELSGVVGSEPFLEKIDQETFLLKQRTYTNGVIPHQVHLIELKAIIDQQKQHYPFLEEAGPKIIALFKFRIPYYVGPLAKEQEASSFAWIERKTAEKINPWNFSEVVDIEKSAMRFIQRMTKQDTYLPTEKVLPKNSLLYQKYMIFNELTKVSYKDERGVKQYFSGDEKQQIFKQLFQKERGKITVKKLQNFLYTHYHIENAQIFGIEKAFNASYSTYHDFMKLAKTNQKAMQEWLEQPEMEPIFEDIVKILTIFEDRQMIKHQLSKYQEVFGEKLLKEFARKHYTGWGRFSAKLIHGIRDRKTNKTILDYLINDDDVPANRNRNLMQLINDEHLSFKEEIAKATVFSKHKSLVDVIQDLPGSPAIKKGIWQSLKIVEELIAIIGYKPKNIVIEMARENQKTHRTSPRLKALENGLKQIGSTLLKEQPTDNKALQKERLYLYYLQNGRDMYTGEPLEIENLHQYEVDHIIPRSFIVDNSIDNKVLVASKQNQKKRDDVPKKQIVNEQRIFWNQLKEAKLISPKKYAYLTKIELTPEDKARFIQRQLVETRQITKHVANILHQSFNQEEEGTDCDGVQIITLKATLTSQFRQTFGLYKVREINPHHHAHDAYLNGFIANVLLKRYPKLAPEFVYGKYVKYSLARENKATAKKEFYSNILKFLESDEPFCDENGEIYWEKSHHLPRIKKVLSSHQVNVVKKVEQQKGGFYKETVNSKEKPDKLIERKNNWDVTKYGGFGSPVIAYAIAFVYAKGKTQKKTRAIEGITIMEQAAFEKDPTTFLKEKGFPQVTEFIKLPKYTLFEFDNGRRRFLASHKESQKGNPFILSDQLVTLLYHAQHYDKITYQESFDYVNTHLSDFSAILTEVLAFAEKYTLADKNIERIQELYEENKYGETSMIAQSFLQLLQFNAIGAPADFKFFGVTIPRKRYTSLTEIWDATIIYQSVTGLYETRIRMGDLWAGEQ

SEQ ID NO: 408 - protein, 116 aa, Enterococcus sp.
MYSIGLDLGISSVGWSVIDERTGNVIDLGVRLFSAKNSEKNLERRTNRGGRRLIRRKTNRLKDAKKILAAVGFYEDKSLKNSCPYQLRVKGLTELLSKGEIYKVTLHILKNVELVT

SEQ ID NO: 409 - protein, 1391 aa, Eubacterium sp.
MENKQYYIGLDVGTNSVGWAVTDTSYNLLRAKGKDMWGARLFDEAKTAVERRTKRTSRRRSEREKARKAMLKELFADEINKVDPNFFIRLEESKFFLDDRSENNRQRYTLFNDAKFTDKDYYEKYKTIFHLRSALINSDEKFDVRLVFLAILNLFSHRGHFLNASLKGDGEIQGVDIFYNDLYEVCEEFEIDLPQISNIDNFEKILSQKGKSRTKILEELSEELSISKKEKIKYSLLKLICGMKIKVVDIYADEDIQEDDKKKDLGFRESDYEKSSLEVKEIIGDDHFELIERAKAVHDIGLLANIIGNSKYLCEARVEAYDNHHKDLQKIKELLKKYDIKAYTDMFRKMTDKNYSAYVGSVNSNIAKERRSVDNRKIEDLYEYIKKIALKNISDDNEDKIEILKKIETGEFLKKQLTASNGVIPNQLQSRELRAILKKAENYLPFLKEKGEKNLTVSEMIIQLFEFQIPYYVGPLDKNPKKDKNANSWAVIPSGGRILPWNFEDKVDVKGSRKEFIEKMVRKCTYLSEEHTLPKQSLLYEKFMVLNEINNIKIDGEKISVEAKQKIYNDLFMKGKKVSQKAIKQELISLNIMSKDSVLSGIDTVCNAYLSSIAKFRGVFDENVNNQSTIDMIEDIIFLKTVYSDEKRFVKEEIVEKYGDEIDKDKIKRILGFKFSNWGNISKSFLELEGADVGTGEIRSIIQSLWETNFNLMELLSSRFTYMDELEKRVKKLEKPLSEWTIEDLDDMYLSSPVKRMIWQSMKIVDEIQTVIGYAPKRIFVEMTRSEGEKVRTKSRKDRLKELYSAIKEDSKQWVKELDAKDESYFRSKKMYLYYLQKGRCMYSGEVIELDKLMDDNLYDIDHIYPRSFVKDDSLDNLVLVKKEINNRKQNDPITPQIQASCQGFWKVLHEQGFISNEKYSRLTRKTQEFSDEEKLSFINRQIVETGQATKCMAQILQKSMGEDVDVVFSKARLVSEFRHKFELFKSRLINDFHHANDAYLNIVVGNSYFVKFTRNPANFIKDARKNPDNPAYKYHMDRFFERDVKSKSEVAWIGQSEGNAGTIAIVKKTMSKNSPLITKKVEEGHGSITKETIVGVKEIKFGRNKVEKADKTPKKANLQAYRPIKTSDERLCNILRYGGRTSISISGYCLVEYVKKRKTIRSLEAIPVYLGRKDSLSEEKLLNYFRYNLNDGGKDSVSDIRLCLPFISTNSLVKIDGYLYYLGGKNDDRIQLYNAYQLKMKKEEVEYIRKIEKAVSMSKFDEIDREKNPVLTEEKNIELYNKIQDKFENTVFSKRMSLVKYNKKDLSFGDFLKNKKSKFEEIDLEKQCKVLYNIIFNLSNLKEVDLSDIGGSKSTGKCRCKKNITNYKEFKLIQQSITGLYSCEKDLMTI

SEQ ID NO: 410 - protein, 1391 aa, Eubacterium yurii
MENKQYYIGLDVGTNSVGWAVTDTSYNLLRAKGKDMWGARLFEKANTAAERRTKRTSRRRSEREKARKAMLKELFADEINRVDPSFFIRLEESKFFLDDRSENNRQRYTLFNDATFTDKDYYEKYKTIFHLRSALINSDEKFDVRLVFLAILNLFSHRGHFLNASLKGDGDIQGMDVFYNDLVESCEYFEIELPRITNIDNFEKILSQKGKSRTKILEELSEELSISKKDKSKYNLIKLISGLEASVVELYNIEDIQDENKKIKIGFRESDYEESSLKVKEIIGDEYFDLVERAKSVHDMGLLSNIIGNSKYLCEARVEAYENHHKDLLKIKELLKKYDKKAYNDMFRKMTDKNYSAYVGSVNSNIAKERRSVDKRKIEDLYKYIEDTALKNIPDDNKDKIEILEKIKLGEFLKKQLTASNGVIPNQLQSRELRAILKKAENYLPFLKEKGEKNLTVSEMIIQLFEFQIPYYVGPLDKNPKKDNKANSWAKIKQGGRILPWNFEDKVDVKGSRKEFIEKMVRKCTYISDEHTLPKQSLLYEKFMVLNEINNIKIDGEKISVEAKQKIYNDLFVKGKKVSQKDIKKELISLNIMDKDSVLSGTDTVCNAYLSSIGKFTGVFKEEINKQSIVDMIEDIIFLKTVYGDEKRFVKEEIVEKYGDEIDKDKIKRILGFKFSNWGNLSKSFLELEGADVGTGEVRSIIQSLWETNFNLMELLSSRFTYMDELEKRVKKLEKPLSEWTIEDLDDMYLSSPVKRMIWQSMKIVDEIQTVIGYAPKRIFVEMTRSEGEKVRTKSRKDRLKELYNGIKEDSKQWVKELDSKDESYFRSKKMYLYYLQKGRCMYSGEVIELDKLMDDNLYDIDHIYPRSFVKDDSLDNLVLVKKEINNRKQNDPITPQIQASCQGFWKILHDQGFMSNEKYSRLTRKTQEFSDEEKLSFINRQIVETGQATKCMAQILQKSMGEDVDVVFSKARLVSEFRHKFELFKSRLINDFHHANDAYLNIVVGNSYFVKFTRNPANFIKDARKNPDNPVYKYHMDRFFERDVKSKSEVAWIGQSEGNSGTIVIVKKTMAKNSPLITKKVEEGHGSITKETIVGVKEIKFGRNKVEKADKTPKKPNLQAYRPIKTSDERLCNILRYGGRTSISISGYCLVEYVKKRKTIRSLEAIPVYLGRKDSLSEEKLLNYFRYNLNDGGKDSVSDIRLCLPFISTNSLVKIDGYLYYLGGKNDDRIQLYNAYQLKMKKEEVEYIRKIEKAVSMSKFDEIDREKNPVLTEEKNIELYNKIQDKFENTVFSKRMSLVKYNKKDLSFGDFLKNKKSKFEEIDLEKQCKVLYNIIFNLSNLKEVDLSDIGGSKSTGKCRCKKNITNYKEFKLIQQSITGLYSCEKDLMTI

SEQ ID NO: 411 - protein, 1142 aa, Facklamia hominis
MYSVGLDIGIASCGYSIINDVNGNIVELGTLLFKSRNSDNNEERRTNRGSRRLINRRRTRLDDGKKLLAEKGFKQDSKLKHVCPYELRVKGLHEKLTQGEIYKVVLHILKKRGISYLDESDENSSGIDGASYKDQVNLNLNLQKELTPGQIQLKRLKENGRIKSGVTFENGYQLNVFSVSAYANELNKILTKQSEYYSEIDQIWIDRFTKNGYRKEAGLVYRKRPYYDGPGNEKNNSIYGRWANFKEDGHPKENIFDQLIGLDSVDSTQVRASASTLTAQKYNLLNDLNNLTIIEDDRKFTTDEKVSIINYLMTQDITRFGPKELAKFYQLEVDQIRGWRIDNKGNPEIHSLKVYRDWKKIFNTSSIDLTSIQTWVVDELANVITLNTEIPSTLATLKIKIPDIDQQILNFVENNFYELKKKTSKNSWHSFSLKTLNILIPELLNTSEEQNTILERLNLKFDLKNKYAEKNQIPVKELLEQIYNPTVTKSVHQSIKLFNEIIEKYGKNNISYVTIEMPRDKNDQDQKDTIKRINKLNSERKNDSEKYFLERSGWDTIRFESALKKPRFAEKLLFYYEQKGKCAYSGQDILAESLLNESCEVDHIIPLSISFDDSIHNKVLVTASSNQEKGQRTPYMAFIDGAKLGQSWDDFVAWVNSCGFHRKKVQNLLYEENIFNPDVQRGFVSRNLNDTRYASRIVLNAIQSFFYKQKDLTKVKVVNGSFTHTLRKKWGSSLDKNRDTYHHHAVDATLCAVTPFINIVKYEFFEEDGIKYMVDLTTGEKVAYSDYKKMKFYDKRAYVPIWDGFIKQLTPANLYPKIKFSHQVDSKWNRKISDATIYSTRKIVETKINKKGVAKETVKDIVIDKIKDIYTPEGWRKFKEKQDKLLMKNFDEKTYNKLIKIAKEYPEKKEVQTSNGKVSLVEVSPFKMYCEEQNVPAIRKYSKKGNGPYIRSLKFYDKELGKHINITKDSYGNDIERTIRNKKIILKNQNSWRTDVYYNSVNNCYELLGIKYCHLKFYRGKYGIPKSIYDELKKEDEISSESVFKFSLYRHDRVRFEKDGEYIEALFGSKNESNKNYLELSPIDKNKWLSKENVKFFGEVAASGRFIKGLKPGIKVIKQSTDYMGHVYAIHQEKLKFVLSDA

SEQ ID NO: 412 - protein, 1347 aa, Finegoldia magna
MKSEKKYYIGLDVGTNSVGWAVTDEFYNILRAKGKDLWGVRLFEKAKTAADTRTFRSGRRRNDRKGMRLQILREIFEDEIKKVDKDFYDRLDESKFWAEDKKVSGKYSLFNDKNFSDKQYFEKFPTIFHLRKYLMEEHGKVDIRYYFLAINQMMKRRGHFLIDGQISHVTDDKPLKEQLILLINDLLKIELEEELMDSIFEILADVNEKRTDKKNNLKELIKGQDFNKQEGNILNSIFESIVTGKAKIKNIISDEDILEKIKEDNKEDFVLTGDSYEENLQYFEEVLQENITLFNTLKSTYDFVILQSILKGKSTLSDAQVERYDEHKKDLEILKKVIKKYDEDGKLFKQVFKEDNGNGYVSYIGYYLNKNKKITAKKKISNIEFTKYVKGILEKQCDCEDEAVKYLLGKIEQENFLLKQISSINSVIPHQIHLFELDKILENLAKNYPSFNNKKEEFTKIEKIRKTFTFRIPYYVGPLNDYHKNNGGNAWIFRNKGEKIRPWNFEKIVDLHKSEEEFIKRMLNQCTYLPEETVLPKSSILYSEYMVLNELNNLRIKGKPLDTDVKLKLIEELFKKKTKVTLKSIRDYMIRNNFADKEDFDNSEKNLEIVSNMKSYIDFNNILGDKFELEMVEDLIEKITIHTGNKTLLKKYIEETYPDLSSSQIQKIINLKYKDWGRLSRKLLDGIKGRNKTDDVNTVINFMRNSSDNLMQIIEGKNYSFNEYIDNLRKKYIPQEISYEVVENLYVSPSVKKMIWQVIRVTEEITKVMGYDPDKIFIEMAKSEEEKKTTISRKNKLLDLYKAIKKDERDSQYEKLLTGLNKLDESELRSKKLYLYYTQMGRDMYTGEKIDLDKLFDSTHYDKDHIIPQSMKKDDSIINNLVLVNKNANQTTKGNIYPVPSSIRNNPDIYNYWKYLMEKEFISKEKYNRLIRNTPLTNEELGVFINRQLVETRQSTKAIKELFEKFYQKSKIIPVKASLASDLRKDMNTLKSREVNDLHHAHDAFLNIVAGDVWNREFTSNPINYVNENREGDKVKYSLSKYFTRPRKSKGKVIWTPEKGRKLIVDTLNKPSVLISNESHVKKGELFNATISGKKDYKKGKIYLPLKKDDRLKDVSKYGGYKAINGAFFFLVEHTKSKKRIRSIELFPLHLLSKFYEDKNTVLDYAINVLQLQDPKIIIDKINYRTEIIIDNFSYLISTKSNDGSITVKPNEQMYWRVDEISNLKKIENKYKKDAILTEEDRKIMESYIDKIYQQFKAGKYKNRRTTDTIIEKYEIIDLDTLDNKQLYQLLVAFISLSYKTSNNAVDFTVIGLGTECGKPRITNLPDNTYLVYKSITGIYEKRIRIK

SEQ ID NO: 413 - protein, 1348 aa, Finegoldia magna; identical to SEQ ID NO: 222

SEQ ID NO: 414 - protein, 1516 aa, Flavobacteriaceae bacterium
MLKQQKDKIIGMNKKILGLDLGTNSIGWALVKQDLENKYGEIIGCGSRIIPMSQDVLGKFDAGISISQTAERTNYRSVRKLIQRNTLRRERLHRVLHQLDFLPKHYNDSIDFEKKLGQFKTDKETKLNYFVNQHGKHEFLFKDSFNEMVKEFKEEQPELFYIKNNGKETKIPYDWTIYYLRKKALSKKISKEELSWLVLNFNQKRGYYQLRGEIDEEKEKNKRYEKLYVSEVVKTNNTIKKTGEYLYDIYFDNGWKYEKQTTKPQDWLHKHKEFIITTTTLKNGETKRTFKTVDSEKDWIAIKSKTEQDIKESNKTVGAFIYDTLLKNPTQKIRGSLVKTIERKFYREEFEKILKEQIKHRPEINVNTAIGKENYTKCVTELYPRNEAHANNILTNDFNYLFTKDILFYQRPLKSKKSEIANCQYEYRTYIKKKEKTGKEERVKQPLKATPKSHPLFQEFRLWQFIHNLKIYIRETTVGNKPLFDVDITDTFFTSENDWATLFEYLNNKKEIEQKHVLEYLVSKKIISKSEKTDYRWNYVEDKKYPGNETRVDFINRLKKVENLNVDEFLTSELEFKLWHIIYSVTDKNEYEKALENFAIRQNIDKDSFVNSFKKFPPFKSDYGAYSTKAIKKLLPLMRLGKFWDGSEIPKVVVEKITDIKTRLTSVNYDESLFKKDEKKILETIVDDITPKQLLKSFVKLKGKNHLAGLNTYQACYLVYERHSESSDITQWENPDDIDSFLNHFKQHSLRNPIVEQVVTETLRTVRDIWKYYGNGSPNYFNEIHIELGREMKNPADKRKQMSAKINENENTNQRIKGILQELMNDGVQDIKPYSPSQQEILKIYEEGISQNPNVDYSKVSEDEITKIKKSNNPTLKEIQRYKLWLEQKYISPYTGKPIPLSELFTPAYQIEHIIPQSRYFDNSLSNKIICESEVNEDKSNKTAYEYLKTNGGSIVHGHHLLSLKEYEDHCQHYFKKNRTKLKNLLSEEIPEGFINRQLNDSRYISKLIKGLLSNIVREENEQEATSKNIVPVTGSITSKLKQDWGLNDKWNEIIAPRFKRLNKMTNSNDFGYFDEKINTFRIQVPDAISRGFNKKRIDHRHHTLDALVIACCTKKHIQYLNSLNNEIIKHELKPSILIKNAQGDYTKHFMLPWNNFPIDCKNAIENTIVSFKQNLRVINKTSNKYQSYKDENGNLRLGKDGKPKKGLTKQTKGNNWAVRKAMHEDTFYGEIVDGENKGKLKIKTLLDTSFDVKKIEDKVLDKSIRTILINYLKQDKYKNLSKPHEEAFSPNGIIEMNKNIISLNNNIPHKPIKRVTLKHEKGKKFSIKTLLDKKTKFAKSATGTNVFFCIYKNINGKIKYHTPSFEEIIEIQKQEFEIKYKSKLNVPETLFDKKESFELLFYLQPNDLVYLPNDEELKNRQLIDFNNLNKKQIKRIYKFTDGSGTTANFIPYQVAKVIFNLNKKEQAKSSFKYPIQNEFGVGSPQSKNQKSIEGILIKERCIKLKIDRLGNISKA

SEQ ID NO: 415 - protein, 1629 aa, Francisella cf.
MNFKILPIAIDLGVKNTGVFSAFYQKGTSLERLDNKNGKVYELSKDSYTLLMNNRTARRHQRRGIDRKQLVKRLFKLIWTEQLNLEWDKDTQQAISFLFNRRGFSFITDGYSPEYLNIVPEQVKAILMDIFDDYNGEDDLDSYLKLATEQESKISEIYNKLMQKILEFKLRKLCTDIKDDKVSTKTLKEITSYEFELLADYLANYSEILKTQKFSYTDKQGNLKELSYYHHDKYNIQEFLKRHATINIQILDTLLTDDLDIWNFNFEKFDFDKNEEKLQNQEDKDHIQAHLHHFVFAVNKIKSEMASGGRHRSQYFQEITNVLDENNHQEGYLKNFCENLHNKKYSNLSVKNLVNLIGNLSNLELKPLRKYFNDKIHAKADHWDEQKFTETYCHWILGEWRVGVKDQDKKDGAKYSYKDLCNELKQKVTKAGLVDFLLELDPCRTIPPYLDNNNRKPPKCQSLILNPKFLDNQYPNWQQYLQELKKLQSIQNYLESFETDLKVLKSSKDQPYFVEYRSSNQQIASGQRDYKDLDARILQFIFDRVKASDELLLNEIYFQAKKLKQKASSELEKLESSKKLDEVIANSQLSQILKSQHTNGIFEQGTFLHLVCKYYKQRQRARDSRLYIMPEYRYDKKLHKYNNTGRFDDDNQLLTYCNHKPRQKRYQLLNDLAGVLQVSPNFLKDKIGSDDDLFISKWLVEHIRGFKKACEDSLKIQKDNRGLLNHKINIARNTKGKCEKEIFNLICKIEGSEDKKGNYKHGLAYELGVLLFGEPNEASKPEFDRKIKKFNSIYSFAQIQQIAFAERKGNANTCAVCSADNAHRMQQIKITEPVEDNKDKIILSAKAQRLPAITTRIVDGAVKKMATILAKNIVDDNWQNIKQVLSAKHQLHIPIITESNAFEFEPALADVKGKSLKDRRKKALERISPENIFKDKNNRIKEFAKGISAYSGANLTDGDFDGAKEELDHIIPRSHKKYGTLNDEANLICVTRGDNKNKGNRIFCLRDLANNYKLKQFETTDDLEIEKKIADTIWDANKKDFKFGNYRSFINLTPQEQKAFRHALFLADENPIKQAVIRAINNRNRTFVNGTQRYFAEVLANNIYLRAKKENLNTDKISFDYFGIPTIGNGRGIAEIRQLYEKVDSDIQAYAKGDKPQASYSHLIDAMLAFCIAADEHRNDGSIGLEIDKNYSLYPLDKNTGEVFTKDIFSQIKITDNEFSDKKLVRKKATEGFNTHRQMTRDGIYAENYLPILIHKELDEVRKGYTWKNSEEIKIFKGKKYDIQQLNNLLYCLKFVDKPISIDIQISTLEELRNILTTNNIAATAEYYYINLKTQKLHEYYIENYNTALGYKKYTKEMEFLRSLAYRSERVKIKSIDDVKQVLDKDSNFIIGKITLPFKKEWQRLYREWQNITIKDDYEFLKSFFNVKSITKLHKKVRKDFSLPISTNEGKFLVKRKTWDNNFIYQILNDSDSRVDGTKPFIPAFDISKNEIVEAIIDSFTSKNIFWLPKNIELQKVDNKNIFAIDTSKWFEVETPSDLRDIGVATIQYKIDNNSRPKVRVKLDYVIDDDSKINYFTNHSLLKSRYPDKVLEILKQSTIIEFESSGFNKTIKEMLGMTLAGIYNETSNN

SEQ ID NO: 416 - protein, 1646 aa, Francisella cf.
MNIKILPIAIDLGAKNTGVFSAFYQKGTSLESLDNKNGKVYELSKDSYTLLMNNRTARRHQRRGIDRKQLVKRLFKLIWTKQLNLEWNKDTQQTISFLLNRRGFSFITDGYSPEYLNIAPEAVKAILMSILDDYNGEDDLDSYLQSATENDSKIDELYNKLLQKALEFKLRKLCIDIKEDKVTTKTLKELSNTEFKLLANYLVDYDRILRTQKFSYTDKQGNLRELNYYHHDKYNIQEFLKRNIIINDVILEKLTDDLDIWNLNFDKFDFEKNLEKLENQEDKDYLQTHLHHFVFAVNKIKSEMASGGRHRSQYFQEITNVLVENNHQEGYLKNFCENLHNKKYSNLSVKNLVNLIGNLSNLELKPLRKYFNDKIHAKADYWDEQKFAETYSDWILGEWRVGAKDKDKKDGAKYSYKNLCDELKQKVGINQDGIINQTKSDFVDFLLELDPCRTIPPYLDNNNRKPPKCQSLILNPKFLDNKYPNWQQYLQELKKLQTVQNYLGNFEIDLKDLKSSKEQPYFVKYKSLNQQIASGQRDYKDLDARVLQFIFDRVKASDELLLNEIYSHAKKLKQNTSSELEKLELCKKLDEVIANSQLSQILKSQHVNGIFEQGTFLHLVCKYYKQRQRARDSRLYIMPEYRYDKKLDKYNNTGRFDDDNQLLTYCNHKPRQKRYQLLNDLAGVLQVSPNFLKDKIGSDDDLFISKWLVEHIRGFKKACEDSLKIQKDNRGLLNHKINIARNTKGKCEKEIFNLICKIEGSEDKKGNYKHGLAYELGVLLFGEPNQASKLEFDRKIKKFNSIYSFAQIQQIAFAERKGNANTCAVCSADNAHRMQQIKVAKPVEGNKDNIILSAKAQRLPAIPTRIVDGAVKKIATILARNIVDDNWDNIKQALSNNQQLHVPIITESNAFEFEPALADIKGKSLKDKRKKALERIDPENVFKDKNNRIKEFAKGISAYSDANLANGDFDGAKEELDHIIPRSHKKYGTLNDEANLICVTREDNQNRGNKAVFLYDLKPNYKLKQFNTTDDLEIEKKIADTIWDASKQDFKFGNYRSFINLTPQEQIAFRHALFLADKNPIKKAVIRAIDNRNRTFVNGTQRYFAEVLANNIYLRAKKENLATNRITFDYFGIETTNSNGRGIADVRKLYEKVDSDIQAYAKGDKPQDSYSHLIDAMIAFCVAADEHKNEGSIGLKMGNQYGLFPTPDKYDENTGEIISWHNDDIFRKIKVSDNQFSDKKLVRKKATEGFNTHRQMTRDGIYGESYLPILIHKNLNEVRKGYNWENSEEIKIFKGKKYDIQQLNNLVYCLKFVDKPISIDIQITTLEELRNILETNNISTTAEYYYINLKTQKLHEYYIENYNTALGYKKYTKEMEFLRSLAYRTERVKIKSIDDVSMILAKDSNFKAGKIELPFKTEWQRLYLEWQNTTIKDNHEFLKSYFSVKNATKQHKKVRKDFSLPISTNEGKLLVKRKTWDNNFIYQILNDSDSRADGTKPFIPAFDISKNEIVETIIKSFTSKNIFWLPKNIELQKVDNKSIFAIDTSRWFEVETPKDLIEIGVSTIQYKIDNNSRPKVRVKLDYVMDDDSKINYFMNHSLLKSRYPDKVLEILKQSTIIEFESSGFNKTIKEMLGMTLAGIYNETSNN

SEQ ID NO: 417 - protein, 1629 aa, Francisella novicida
MNFKILPIAIDLGVKNTGVFSAFYQKGTSLERLDNKNGKVYELSKDSYTLLMNNRTARRHQRRGIDRKQLVKKLFKLIWTEQLNLEWDKDTQQAISFLFNRRGFSFITDGYSPEYLNIVPEQVKAILMDIFDDYNGEDDLDSYLKLATEQESKISEIYNKLMQKILEFKLRKLCTDIKDDKVSTKTLKEITSYEFELLADYLANYSESLKTQKFSYTDKQGNLKELSYYHHDKYNIQEFLKRHATINDEILDTLLTDDLDIWNFNFEKFDFDKNEEKLQNQEDKDHTQAHLHHFVFAVNKIKSEMASGGRHRGQYFQEITNVLDENNHQEGYLKNFCENLHNKKYSNLSVKNLVNLIGNLSNLELKPLRKYFNDKIHAKADHWDEQKFTETYCHWILGEWRVGLKDQDKKEGAKYSYKDLCNELKQKVTNAGLIDFLLELDPCRTIPPYLDNNNRKPPKCQSLILNPKFLDNQYPNWQQYLQELKKLQIIQDYLESFETDLKVLKSSKDQPYFVEYKSSNQQIASGQRDYKDLDARILQFIFDRVKASDELLLNEIYFQAKKLKQKASSELEKLESSKKLDEVIANSQLSKILKSQHTNGIFEQGTFLHLVCKYYKQRQRARDSRLYIMPEYRYDKKLDKYNNTGRFDDDNQLLTYCNHKPRQKRYQLLNDLAGVLQVSPNFLKDKIGSDDDLFISKWLVEHIRGFKKACEDSLKIQKDNRGLLNHKINIARNTKGKCEKEIFNLICKIEGSEDKKGNYKHGLAYELGVLLFGEPNEASKPEFDRKIKKFNSIYSFAQIQQIAFAERKGNANTCAVCSADNAHRMQQIKITEPVEDNKDKIILSAKAQRLPAIPTRIVDGAVKKMATILAKNIVDDNWQNIKQVLSAKHQLHIPIITESNAFEFEPALADVKGKSLKDRRKKALERISPENIFKDKNNRIKEFAKGISAYSGANLTDGDFDGAKEELDHIIPRSHKKYGTLNDEANLICVTRDDNKNKGNRIFCLHDLANNYKLKQFETTDDLEIEKKIADTIWDASKKDFKFGNYRSFINLTPQEQKAFRHALFLADENPIKQAVIRAINNRNRTFVNGTQRYFAEVLANNIYLRAKKENLNTDKISFDYFGIPTIGNGRGIAEIRQLYEKVDSDIQVYAKGDKPQASYSHLIDAMLAFCIAADEHRNDGSIGLEIDKNYSLYPLDKNTGEVFTKDIFSQIKITDNEFSDKKLVRKKATEGFNTHRQMTRDGIYAENYLPILIHKELDEVRKGYTWKNSEEIKIFKGKKYDIQQLNNLLYCLKFVDKPISIDIQISTLEELRNILTTNNIAATAEYYYINLKTQKLHEYYIENYNTALGYKKYTKEMEFLRSLAYRSERVKIKSIDDVKQVLDKDSNFIIGKITLPFKKEWQRLYREWQNTTIKDDYEFLKSFFNVKSITKLHKKVRKDFSLPISTNEGKFLVKRKTWDNNFIYQILNDSDSRVDGTKPFIPAFDISKNEIVEAIIDSFTSKNIFWLPKNIELQKVDNKNIFAIDTSKWFEVETPSDLRDIGVATIQYKIDNNSRPKVRVKLDYVIDDDSKINYFTNHSLLKSRYPDKVLEILKQSTIIEFESSGFNKTIKEMLGMTLAGIYNETSNN

SEQ ID NO: 418 - protein, 1629 aa, Francisella novicida
MNFKILPIAIDLGVKNTGVFSAFYQKGTSLERLDNKNGKVYELSKDSYTLLMNNRTARRHQRRGIDRKQLVKRLFKLIWTEQLNLEWDKDTQQAISFLFNRRGFSFITDGYSPEYLNIVPEQVKAILMDIFDDYNGEDDLDSYLKLATEQESKISEIYNKLMQKILEFKLMKLCTDIKDDKVSTKTLKEITSYEFELLADYLANYSESLKTQKFSYTDKQGNLKELSYYHHDKYNIQEFLKRHATINDRILDTLLTDDLDIWNFNFEKFDFDKNEEKLQNQEDKDHIQAHLHHFVFAVNKIKSEMASGGRHRSQYFQEITNVLDENNHQEGYLKNFCENLHNKKYSNLSVKNLVNLIGNLSNLELKPLRKYFNDKIHAKADHWDEQKFTETYCHWILGEWRVGVKDQDKKDGAKYSYKDLCNELKQKVTKAGLVDFLLELDPCRTIPPYLDNNNRKPPKCQSLILNPKFLDNQYPNWQQYLQELKKLQSIQNYLDSFETDLKVLKSSKDQPYFVEYKSSNQQIASGQRDYKDLDARILQFIFDRVKASDELLLNEIYFQAKKLKQKASSELEKLESSKKLDEVIANSQLSQILKSQHTNGIFEQGTFLHLVCKYYKQRQRARDSRLYIMPEYRYDKKLHKYNNTGRFDDDNQLLTYCNHKPRQKRYQLLNDLAGVLQVSPNFLKDKIGSDDDLFISKWLVEHIRGFKKACEDSLKIQKDNRGLLNHKINIARNTKGKCEKEIFNLICKIEGSEDKKGNYKHGLAYELGVLLFGEPNEASKPEFDRKIKKFNSIYSFAQIQQIAFAERKGNANTCAVCSADNAHRMQQIKITEPVEDNKDKIILSAKAQRLPAIPTRIVDGAVKKMATILAKNIVDDNWQNIKQVLSAKHQLHIPIITESNAFEFEPALADVKGKSLKDRRKKALERISPENIFKDKNNRIKEFAKGISAYSGANLTDGDFDGAKEELDHIIPRSHKKYGTLNDEANLICVTRGDNKNKGNRIFCLRDLADNYKLKQFETTDDLEIEKKIADTIWDANKKDFKFGNYRSFINLTPQEQKAFRHALFLADENPIKQAVIRAINNRNRTFVNGTQRYFAEVLANNIYLRAKKENLNTDKISFDYFGIPTIGNGRGIAEIRQLYEKVDSDIQAYAKGDKPQASYSHLIDAMLAFCIAADEHRNDGSIGLEIDKNYSLYPLDKNTGEVFTKDIFSQIKITDNEFSDKKLVRKKAIEGFNTHRQMTRDGIYAENYLPILIHKELNEVRKGYTWKNSEEIKIFKGKKYDIQQLNNLVYCLKFVDKPISIDIQISTLEELRNILTTNNIAATAEYYYINLKTQKLHEYYIENYNTALGYKKYSKEMEFLRSLAYRSERVKIKSIDDVKQVLDKDSNFIIGKITLPFKKEWQRLYREWQNTTIKDDYEFLKSFFNVKSITKLHKKVRKDFSLPISTNEGKFLVKRKTWDNNFIYQILNDSDSRVDGTKPFIPAFDISKNEIVEAIIDSFTSKNIFWLPKNIELQKVDNKNIFAIDTSKWFEVETPSDLRDIGVATIQYKIDNNSRPKVRVKLDYVIDDDSKINYFTNHSLLKSRYPDKVLEILKQSTTIEFESSGFNKTIKEMLGMTLAGIYNETSNN

SEQ ID NO: 419 - protein, 244 aa, Francisella tularensis
ARKQNSEIYNKLMQKILEFKLRKLCTDIKDDKVSTKTLKEITSYEFELLADYLANYSESLKTQKFSYTDKQGNLKELSYYHHDKYNIQEFLKRHATINDEILDTLLTDDFDIWNFNFEKFDFDKNEEKLQNQEDKDHTQAYLHHFVFAVNKIKSEMASGGRHRSQYFQEITNVLDENNHQEGYLKNFCENLHNKKYSNLSVKNLVNLVGNLSNLELKPLRKYFNDKNLIIGMSKSLQKLIATGY

SEQ ID NO: 420 - protein, 501 aa, Francisella tularensis
MEIEKKIADTIWDASKQDFKFGNYRSFINLTPQEQKAFRYALFLADENSIKQAVIRAINNRNRTFVNGTQRYFAEVLANNIYLRAKKENLNTDKISFDYFGIPTIGNGRGIADIRQLYEKVDSDIQAYAKGDKPQASYSHLIDAMIAFCVAADEHRNDGSIGLEIDKNYSLYLLDKNTGEVFTKDIFSQIKITDNEFSDKKLVRKKATEGFNTHRQMTRDGIYAENYLPILIHKELDEVRKGYTWGNSEELKIHKGKKYNIQQLNNIVYCLKFIDKSISIDIQISTLEELRNILTTNNIAATAEYYYINLKNQKLHEYYIENYNTALDYKKYSKEMEFLRSLAYRSERVKIKSIDDVKQVLDKDSNFIIGKITLPFKKEWQRLYLEWQNTTIKDDYEFLKSFFNVKSITKLHKKVRKDFSLPISTNEGKFLVKRKTWDNNFIYQILNDSDSRVDGTKPFIPAFDISKNEIVEAIIDSFTSKNIFWLPKNIELQNVDKIFLL

SEQ ID NO: 421 - protein, 158 aa, Francisella tularensis
MIDFLLELDPCITIPPYLDNNNRKPPKCQSLILNPKFLDNQYPNWQQYLQELKKLQSIQDYLDSFETDLKDLKSSKDQPYFVEYKSSNQQMASGQRDYKDLDARILQFIFDRVKASDELLLNEIYFQAKKLKQKASSELEKLESSKKLDEVIANSQLS

SEQ ID NO: 422 - protein, 878 aa, Francisella tularensis
MLNDLAGVLQVSRNQLLSSVEEWFQQAQRVGEISKSQDEQIFEWLKSFKIASYCKAAVEMQKQYRGTLKNAIQTAIFRQSENINKNKNKNKNTGNQQQALSENSKDVKSLTADEKKLLKLIENIAKASQKIGESLGLNDKQIKKFNSIYNFAQIQQIAFAERKGNANTCAVYSADNAHRMQQIKITELVEDNKDNIILSAKAQRLPAIPTRIVDGAVKKMATILAKNIVDDNWQNIKQVLSAKHQLHIPIITESNAFEFEPALADVKGKSLKDRRKKALERISPENIFKDKNNRIKEFAKGISAYSGANLTDGDFDGAKEELDHIIPRSYKKYGTLNDEVNLICVTRDDNKNKGKRIFCLNDLANNYKLKQFETTDDLEIEKKIADTIWDASKQDFKFGNYRSFINLIPQEQKAFRYALFLADENSIKQAVIRAINNRNRTFVNGTQRYFAEVLANNIYLRAKKENLNTDKISFDYFGIPTIGNGRGIADIRQLYEKVDSDIQAYAKGDKPQASYSHLIDAMIAFCVAADEHRNDGSIGLEIDKNYSLYPLDKNTGEVFTKDIFSQIKITDNEFSDKKLVRKKATEGFNTHRQMTRDGIYAENYLPILIHKELDEVRKGYTWGNSEELKIHKGKKYNIQQLNNIVYCLKFIDKSISIDIQISTLEELRNILTTNNIAATAEYYYINLKNQKLHEYYIENYNTALDYKKYSKEMEFLRSLAYRSERVKIKSIDDVKQVLDKDSNFIIGKITLPFKKEWQRLYLEWQNTTIKDDYEFLKSFFNVKSINKLHKKVRKDFSLPISTNEGKFLVKRKTWDNNFIYQILNDSDSRVDGTKPFIPAFDISKNEIVEAIIDSFTSKNIFWLPKNIELQKVDKIFLL

SEQ ID NO: 423 - protein, 292 aa, Francisella tularensis
MLNDLAGVLQVSRNQLLSSVEEWFQQAQRVGEISKSQDEQIFEWLKSFKIASYCKAAVEMQKQYRGTLKNAIQTAIFRQSENINKNKNKNTGNQQQALSENSKDVKSLTADEKKLLKLIENIAKASQKIGESLGLNDKQIKKFNSIYNFAQIQQIAFAERKGNANTCAVYSADNAHRMQQIKITELVEDNKDNIILSAKAQRLPAIPTRIVDGAVKKMVTILAKNIVDDNWQNIKQVLSAKHQLHIPIITESNAFEFEPALADVKGKSLKDRRKKALERISPENIFKDKNIC

SEQ ID NO: 424 - protein, 53 aa, Francisella tularensis
MNHSLLKSRYPDKVLEILKQSTIIEFESSGFNKTIKEMLGMTLAGIYNETSNN

SEQ ID NO: 425 - protein, 393 aa, Francisella tularensis
MNVKILPIAIDLDVKNTGVFSAFYQKGTSLEKLDNKNGKVYELSKDSYTLLMNNRTAQRHQRRGIDRKQLVKRLFKLVWTEQLNLEWDKDTQQAISFLFNRRGFSFITDGYSTEYLNIVPEQVKAILMDIFDDYNGEDDLDSYLKLATEQESKISEIYNKLMQKILEFKLRKLCTDIKDDKVSTKTLKEITSYEFELLADYLANYSESLKTQKFSYTDKQGNLKELSYYHHDKYNIQEFLKRHATINDEILDTLLTDDFDIWNFNFEKFDFDKNEEKLQNQEDKDHTQAYLHHFVFAVNKIKSEMASGGRHRSQYFQEITNVLDENNHQEGYLKNFCENLHNKKYSNLSVKNLVNLVGNLSNLELKPLRKYFNDKNLIIGMSKSLQKLIATGY

SEQ ID NO: 426 - protein, 1629 aa, Francisella tularensis
MNVKILPIAIDLGVKNTGVFSAFYQKGTSLERLDNKNGKVYELSKDSYTLLMNNRTARRHQRRGIDRKQLVKRLFKLIWTEQLNLEWDKDTQQAISFLFNRRGFSFITDGYSPEYLNIVPEQVKAILMDIFDDYNGEDDLDSYLKLATEQESKISEIYNKLMQKILEFKLRKLCTDIKDDKVSTKTLKEITSYEFELLADYLANYSEILKTQKFSYTDKQGNLKELSYYHHDKYNIQEFLKRHATINDEILDTLLTDDLDIWNFNFEKFDFDKNEEKLQNQEDKDHTQAHLHHFVFAVNKIKSEMASGGRHRGQYFQEITNVLDENNHQEGYLKNFCENLHNKKYSNLSVKNLVNLIGNLSNLELKPLRKYFNDKIHAKADHWDEQKFTETYCHWILGEWRVGVKDQDKKDGAKYSYKDLCNELKQKVTKAGLVDFLLELDPCRTIPPYLDNNNRKPPKCQSLILNPKFLDNQYPNWQQYLQELKKLQSIQNYLESFETDLKVLKSSKDQPYFVEYKSSNQQIASGQRDYKDLDARILQFIFDRVKASDELLLNEIYFQAKKLKQKASSELEKLESSKKLDEVIANSQLSQILKSQHTNGIFEQGTFLHLVCKYYKQRQRARDSRLYIMPEYRYDKKLDKYNNTGRFDDDNQLLTYCNHKPRQKRYQLLNDLAGVLQVSPNFLKDKIGSDDDLFISKWLVEHIRGFKKACEDSLKIQKDNRGLLNHKINIARNTKGKCEKEIFNLICKIEGSEDKKGNYKHGLAYELGVLLFGEPNEASKPEFDRKIKKFNSIYSFAQIQQIAFAERKGNANTCAVCSADNAHRMQQIKITEPVEDNKDKIILSAKAQRLPAIPTRIVDGAVKKMATILAKNIVDDNWQNIKQVLSAKHQLHIPIITESNAFEFEPALADVKGKSIKDRRKKALERISPENIFKDKNNRIKEFAKGISAYSGDNLASGDFDGAKEELDHIIPRSHKKYGTLNDEANLICVTRDDNKNKGNRIFCLHDLANNYKLKQFETTDDLEIEKKIADTIWDASKKDFKFGNYRSFINLTPQEQKAFRHALFLADENPIKQAVIRAINNRNRTFVNGTQRYFAEVLANNIYLRAKKENLNTDKISFDYFGIPTIGNGRGIVEIRQLYEKVDSDIQAYAKGDKPQASYSHLIDAMLAFCIAADEHRNDGSIGLEIDKNYSLYPLDKNTGEVFTKDIFSQIKITNNEFSDKKLVRKKATEGFNTHRQMTRDGIYAENYLPILIHKELDEVRKGYTWGNSEELKIHKGKKYDIQQLNNLVYCLKFIDKSISIDIQISTLEELRNILTTNNIATTAEYYYINLKTQKLHEYYIENYNTALGYKKYTKEMEFLRSLAYRSERVKIKSIDDVKQVLDKDSNFIIGKITLPFKKEWQRLYREWQNTTIKDDYEFLKSFFNVKSITKLHKKVRKDFSLPISTNEGKFLVKRKTWDNNFIYQILNDSDSRVDGTKPFIPAFDISKNEIVEAIIDSFTSKNIFWLPKNIELQKVDNKNIFAIDTSKWFEVETPSDLRDIGVATIQYKIDNNSRPKVRVKLDYVIDDDSKINYFTNHSLLKSRYPDKVLEILKQSTIIEFESSGFNKTIKEMLGMTLAGIYNETSNN

SEQ ID NO: 427 - protein, 285 aa, Francisella tularensis
MTRDGIYAENYLPILIHKELDEVRKGYTWGNSEELKIHKGKKYNIQQLNNIVYCLKFIDKSISIDIQISTLEELRNILTTNNIAATAEYYYINLKNQKLHEYYIENYNTALDYKKYSKEMEFLRSLAYRSERVKIKSIDDVKQVLDKDSNFIIGKITLPFKKEWQRLYLEWQNTTIKDDYEFLKSFFNVKSITKLHKKVRKDFSLPISTNEGKFLVKRKTWDNNFIYQILNDSDSRVDGTKPFIPAFDISKNEIVEAIIDSFTSKNIFWLPKNIELQKVDKIFLL

SEQ ID NO: 428 - protein, 1323 aa, Fructobacillus fructosus
MVYDVGLDIGTGSVGWVALDENGKLARAKGKNLVGVRLFDTAQTAADRRGFRTTRRRLSRRKWRLRLLDELFSAEINEIDSSFFQRLKYSYVHPKDEENKAHYYGGYLFPTEEETKKFHRSYPTIYHLRQELMAQPNKRFDIREIYLAIHHLVKYRGHFLSSQEKITIGSTYNPEDLANAIEVYADEKGLSWELNNPEQLTEIISGEAGYGLNKSMKADEALKLFEFDNNQDKVAIKTLLAGLTGNQIDFAKLFGKDISDKDEAKLWKLKLDDEALEEKSQTILSQLTDEEIELFHAVVQAYDGFVLIGLLNGADSVSAAMVQLYDQHREDRKLLKSLAQKAGLKHKRFSEIYEQLALATDEATIKNGISTARELVEESNLSKEVKEDTLRRLDENEFLPKQRTKANSVIPHQLHLAELQKILQNQGQYYPFLLDTFEKEDGQDNKIEELLRFRIPYYVGPLVTKKDVEHAGGDADNHWVERNEGFEKSRVTPWNFDKVFNRDKAARDFIERLTGNDTYLIGEKTLPQNSLRYQLFTVLNELNNVRVNGKKFDSKTKADLINDLFKARKTVSLSALKDYLKAQGKGDVTITGLADESKFNSSLSSYNDLKKTFDAEYLENEDNQETLEKIIEIQTVFEDSKIASRELSKLPLDDDQVKKLSQTHYTGWGRLSEKLLDSKIIDERGQKVSILDKLKSTSQNFMSIINNDKYGVQAWITEQNTGSSKLTFDEKVNELTTSPANKRGIKQSFAVLNDIKKAMKEEPRRVYLEFAREDQTSVRSVPRYNQLKEKYQSKSLSEEAKVLKKTLDGNKNKMSDDRYFLYFQQQGKDMYTGRPINFERLSQDYDIDHIIPQAFTKDDSLDNRVLVSRPENARKSDSFAYTDEVQKQDGSLWTSLLKSGFINRKKYERLTKAGKYLDGQKTGFIARQLVETRQIIKNVASLIEGEYENSKAVAIRSEITADMRLLVGIKKHREINSFHHAFDALLITAAGQYMQNRYPDRDSTNVYNEFDRYTNDYLKNLRQLSSRDEVRRLKSFGFVVGTMRKGNEDWSEENTSYLRKVMMFKNILTTKKTEKDRGPLNKETIFSPKSGKKLIPLNSKRSDTALYGGYSNVYSAYMTLVRANGKNLLIKIPISIANQIEVGNLKINDYIVNNPAIKKFEKILISKLPLGQLVNEDGNLIYLASNEYRHNAKQLWLSTTDADKIASISENSSDEELLEAYDILTSENVKNRFPFFKKDIDKLSQVRDEFLDSDKRIAVIQTILRGLQIDAAYQAPVKIISKKVSDWHKLQQSGGIKLSDNSEMIYQSATGIFETRVKISDLL

SEQ ID NO: 429 - protein, 1367 aa, Fusobacterium sp.
MKKQKFSDYYLGFDIGTNSVGWCVTDLDYNVLRFNKKDMWGSRLFDEAKTAAERRVQRNSRRRLKRRKWRLNLLEEIFSDEIMKIDSNFFRRLKESSLWLEDKNSKEKFTLFNDDNYKDYDFYKQYPTIFHLRDELIKNPEKKDIRLIYLALHSIFKSRGHFLFEGQNLKEIKNFETLYNNLISFLEDNGINKSIDKDNIKKLEKIICDSGKGLKDKEKEFKEIFNSDKQLVAIFKLSVGSSVSLNDLFDTDEYKKEEVEKEKISFREQIYEDDKPIYYSILGEKIELLDIAKSFYDFMVLNNILSDSNYISEAKVKLYEEHKKDLKNLKYIIRKYNKENYDKLFKDKNENNYPAYIGLNKEKGKKEVVEKSGLKIDDLIKVIKGYLPKPERIEEKDKTIFNEILNKIELKTILPKQRISDNGTLPYQIHEVELEKILENQSKYYDFLNYEENGVSTKDKLLKTFKFRIPYYVGPLNSYHKDKGGNSWIVRKEEGKILPWNFEQKVDIEKSAEEFIKRMTNKCTYLNGEDVIPKDSFLYSEYIILNELNKVQVNDEFLNEENKRKIIDELFKENKKVSEKKFKEYLLVNQIANRTVELKGIKDSFNSNYVSYIKFKDIFGEKLNLDIYKEISEKSILWKCLYGDDKKIFEKKIKNEYGDILNKDEIKKINSFKFNTWGRLSEKLLTGIEFINLETGECYSSVMEALRRTNYNLMELLSSKFTLQESIDNGNKEMNEVSYRDLIEESYVSPSLKRAILQTLKIYEEIKKITGRVPKKVFIEMARGGDETMKNKKIPARQEQLKKLYDSCGNDIANFSIDIKKMKSSLSSYDNNSLRQKKLYLYYLQFGKCMYTGREIDLDRLLQNNDTYDIDHIYPRSKVIKDDSFDNLVLVLKNENAEKSNEYPVKKEIQEKMKSFWRFLKEKNFISDEKYKRLTGKDDFELRGFMARQLVNVRQTTKEVGKILQQIEPEIKIVYSKAEIASSFREMFDFIKVRELNDTHHAKDAYLNIVAGNVYNTKFTEKPYRYLQEIKENYDVKKIYNYDIKNAWDKENSLEIVKKNMKKNTVNITRFIKEEKGQLFDLNPIKKGETSNEIISIKPKLYNGKEEKLNEKYGYYKSLNPAYFLYVEHKEKNKRIKSFERVNLVDVNNIKDEKSLVKYLIENKKLVEPRLIKKVYKRQVILINDYPYSIVALDSNKLMDFENLKPLFLENKYEKILKNVIKFLEDNQGKSEENYKFIYLKKKDRYEKNETLESVKDRYNLEFNEMYDKFLEKLDSKDYKNYINNKKYKNLLDVKEKFIKLNLFDKAFTLKSFLDLFNRKTMADFSKVGLTKYLGKIQKISSNVLSKNELYLLEESVTGLFVKKIKL

SEQ ID NO: 430 - protein, 1367 aa, Fusobacterium sp.
MKKQKFSDYYLGFDIGTNSVGWCVTDLDYNVLRFNKKDMWGSRLFDEAKTAAERRVQRNSRRRLKRRKWRLNLLEEIFSDEIMKIDSNFFRRLKESSLWLEDKNSKEKFTLFNDDNYKDYDFYKQYPTIFHLRDELIKNPEKKDIRLIYLALHSIFKSRGHFLFEGQNLKEIKNFETLYNNLISFLEDNGINKSIDKDNIKKLEKIICDSGKGLKDKEKEFKEIFNSDKQLVAIFKLSVGSSVSLNDLFDTDEYKKEEVEKEKISFREQIYEDDKPIYYSILGEKIELLDIAKSFYDFMVLNNILSDSNYISEAKVKLYEEHKKDLKNLKYIIRKYNKENYDKLFKDKNENNYPAYIGLNKEKGKKEVVEKSGLKIDDLIKVIKGYLPKPERIEEKDKIIFNEILNKIELKTILPKQRISDNGTLPYQIHEVELEKILENQSKYYDFLNYEENGVSTKDKLLKTFKFRIPYYVGPLNSYHKDKGGNSWIVRKEEGKILPWNFEQKVDIEKSAEEFIKRMTNKCTYLNGEDVIPKDSFLYSEYIILNELNKVQVNDEFLNEENKRKIIDELFKENKKVSEKKFKEYLLVNQIANRTVELKGIKDSFNSNYVSYIKFKDIFGEKLNLDIYKEISEKSILWKCLYGDDKKIFEKKIKNEYGDILNKDEIKKINSFKFNTWGRLSEKLLTGIEFINLETGECYSSVMEALRRTNYNLMELLSSKFTLQESIDNGNKEMNEVSYRDLIEESYVSPSLKRAILQTLKIYEEIKKITGRVPKKVFIEMARGGDETMKNKKIPARQEQLKKLYDSCGNDIANFSIDIKKMKSSLSSYDNNSLRQKKLYLYYLQFGKCMYTGREIDLDRLLQNNDTYDIDHIYPRSKVIKDDSFDNLVLVLKNENAEKSNEYPVKKEIQEKMKSFWRFLKEKNFISDEKYKRLTGKDDFELRGFMARQLVNVRQTTKEVGKILQQIEPEIKIVYSKAEIASSFREMFDFIKVRELNDTHHAKDAYLNIVAGNVYNTKFTEKPYRYLQEIKENYDVKKIYNYDIKNAWDKENSLEIVKKNMKKNTVNITRFIKEEKGQLFDLNPIKKGETSNEIISIKPKLYNGKEEKLNEKYGYYKSLNPAYFLYVEHKEKNKRIKSFERVNLVDVNNIKDEKSLVKYLIENKKLVEPRLIKKVYKRQVILINDYPYSIVALDSNKLMDFENLKPLFLENKYEKILKNVIKFLEDNQGKSEENYKFIYLKKKDRYEKNETLESVKDRYNLEFNEMYDKFLEKLDSKDYKNYINNKKYKNLLDVKEKFIKLNLFDKAFTLKSFLDLFNRKTMADFSKVGLTKYLGKIQKISSNVLSKNELYLLEESVTGLFVKKIKL

SEQ ID NO: 431 - protein, 1367 aa, Fusobacterium sp.
MKKQQFSDYYLGFDIGTNSVGWCVTDFNYNVLRFNKKDMWGSRLFDEAKTAAERRVQRNSRRRLKRRKWRLNLLEEIFSDEILKIDSNFFRRLKESSLWLEDKSSKEKFTLFNDDNYKDYDFYKQYPTIFHLRNELIKNPEKKDIRLVYLALHSIFKSRGHFLFEGQNLKDIKNFETLYNNLMAFLEDNDIYKNIDSSYIGNLENIICDSKKGLKDKEKEFKEIFNSDKQLVGFFKLSVGSSVSLNDLFDTDEYKKGEVEKEKISFREQIYEDDKPIYYSILGEKIEFLDIAKSFYDFMVLNNILADSQYISEAKVKLYDEHKRDLKNLKYIIRKYNKENYDKLFKDKNESNYSAYIGLNKEKGKKEVIEKSRLKIDDFAKIIKGYLPKAEKIDEKDRSIFNEILDKIELKTILPKQRISDNGTLPYQIHEAELEKILENQAKYYDFLNHEENGISTKDKLLMTFKFRIPYYVGPLNSYHKNKGGNSWIVRKEEGKILPWNFEQKVDIEKSAEEFIKRMTNKCTYLNGEDVIPKDSFLYSEYIILNELNKVQVNDEFLNKEIKKKIIEDLFKKSKKISEKNFREYLLVNQITNKTVELKGVKDAFNSNYVSYIKFKDIFGDKLNLDIYKEISEKSILWKCLYGDDKKIFEKKIKSVYGDILTKDEIKKINSFKFNTWGRLSEKLLTEIEFIDLETGECYSSVMDALRRTNYNLMELLSSKFTLQENIDNENKEVSEFSYRDLVEESYVSPSLKRAILQTLKIYEEIRKITGRIPKKVFIEMARGGDETMKNKKIPARQEQLKKLYDSCGKDISNFSIDIKEMKNSLNSYDNNSLRQKKLYLYYLQFGKCMYTGKEIDLNRLLQNNDTYDIDHIYPRSKVIKDDSFDNLVLVLKNENAEKSNEYPLKKEIQEKMKSFWKFLKEKNFISDEKYKRLTGKDEFELRGFMARQLVNVRQTTKEAGKILQQIEPEIKIVYSKAEIASSFREMFDFIKVRELNDTHHAKDAYLNIVAGNVYNTKFTEKPYRYLQEIKENYDVKKIYNYDIKNAWDKEKSLEIVKKNMEKNTVNITRFIKEEKGQLFDLNPIRKGETSNEIIAIKPKFYEGSTEKLNEKYGYYKSLNPAYFIYVEHKEKNKIIRSFERVNLVDVNKIKDEKSLIKYLIENKGLIEPKVIKKVYKRQVILINNFPYSIVALDSNKLMDFENLKPLFLERKYEKILKNAIKFLEDNQGKTEEYYKFLYLKKKDRNEKNETIDSVKERYNIEFNEMYDKFLEKLDSKDYKNYINNKKYSELVNVKEKFIKLNLFDKAFTLKSFLDLFNRKTMADFSKVGLTKYLGKIQKISSNVLSKNELHLLEESVTGLFVKKIKL

SEQ ID NO: 432 - protein, 1391 aa, Galbibacter sp.
MKTILGLDLGTNSIGWALVKEAENENEVSDIIKLGVRVNPLTVDELTNFEGGKAYSNNAERTLKRGARRNLQRYKLRRENLIEILLKNGLINKDTALTEVGKETTHQTLKLRSKSANEKVSLEDLAKILLSINKKRGYKSSRKVNAEDDGVAIDGMEVAKLLYDENMTPGEYVLRLLESGKKHLPDFYRSDLQEEFNLVWKKQSEFYPLILTKELFFELHGKNKSQTWAICKEPLGIVGVKLKGSAKEQKFARYRLRKEALTQQIELEHLAIVLQDINNDSNKSSGYLGAISDRSKELFFNKETVGQYQYKQLQKDPNTSLKNQVFYRQDYLDEFEVIWRNQAKFYPQLTNELKQEIRDVVIFYQRKLKSQKNLISFCQFESTQQNYVEKETGKTKIRTIGRRVIPRSSPLFQEFKIWQSLNNLKFVNSESNQIIQFIELEDDVKKVVFDELNLRGDLKPNQVLKILSKYMKIGKLTQWKCNLEEIEGNRTNSALYNVFQMIAEEEGYGFNWGKKSALEIKSELKAIFSSIGINDSILDFDFSKKLDQQLSYQLWHLLYSAEEGNSKITEEDKFTYGNTGVALKKKLHLKFGFKPEYSTLISNLRFTSDYGNLSSKAISKILPFLRDGSDYSKACQYAGYNHSNSLSADELDNRELKPKLELLKKNSLRNPVVEKILNQMVNVVNQVIDNYGKPDEVRIELARELKKSAKERSQMTKNISDATRRNAEIKKYLSKEFGIPNPTKGDVIRYRLWEELASNGYKDLFRDKYIPKEKLFSNEIDIEHIIPKALLFDDSFSNKTLAFKVDNLKKADRTAFDFMSTDFSKDVDSYIGRIETLHKDGKISSSKYKKLMIPKSKLVDGFIERDLRNTQYIAKQARKMLLEVFKTVVPTTGKITDKLREDWDLINVMKELNFPKYKALGLTKKIERFDVGSEKIKSINVIEGWSKRNDHRHHAMDALAVAFTTHNHIQYLNYLNARKDIHHEMHGTIKSIENQIIGKDVMGKRRFIPPISDLRMKAKLQIESILISFKNKNKVVTWSVNKTKLKGKDNYNKRRQLTPRGQLHKETVYGKIKLIDPKPLKLNNKFTLVRASMIVDKVHREIVLQHLSKYDNNSEVAFDSKTIKIDPILIEGIGLKEVVCYEDVFKIRKKISGDNFKNEKHLEKVIDEKVKQILKDRVIKFQGNFKEAFSNLEENPIWLNKSKGIAVKSVAIKGVNNAESLHEGKDHFGDQILDKNKKQIPVDFVSTGNNHHVGIYEDKDGNLQERVVSFFEAVTRVNEGLPIIDKTYNSDIGWKFKFTMKQNEMFVFPSDDFDPNEFDLTDGKNAAKISPNLYRVQKIATKNYMFRHHLETVVTNDLEFTYKSIRSTGWLRNLVKVRINHLGEIVYVGEY

SEQ ID NO: 433 - protein, 1186 aa, Gardnerella vaginalis
MEGNISYAIGIDVGLNSVGLAAIRLDDYGEPIRILKAMSVIHDAGIDPNGAKESDTRKAISGVARRVRRLYRQRRRRLQKLDFLLQSLGWPVVENKDLDFSDSFIPWIFRAKLADEYIADEEQRKQMLSVAIRHIARHRGWRNPYQSIKSMMQETEYSEFYNELLKNIEKLAPGVGCEGSTPAQLVRDYLLSQQGKASRRLRITTGGRRKNHPHSLDPVLPRKLMQSDNMLEILNIFNVQHIDDKYVREQIINAVFYAESPRGSAENRVGKDAITGKGKRALKASLAFQKYRIISTISNLRIRENSKERCLTIEEKQNVYKLLTTSIDKSSKRKSAEAPLYTWIDVADCLGIERYKLRGVGSQIGDGESVGNRPPMLNSELAILYANNKSLGQSLITWWLASNRTQEDKEALIEILSNTVDIEAIHDNPEYQDKYGSAIAFIDSMNETEIAALENISLPDGRAAYSLETLDELNKQMLETDDDLFEARKKLFNLPNNWRPAEAPIAEPTGNPSVDRVLKIVHRFLISAKNRWGNPERINIEHVRSGFQSKKMANSYKELLDKRTEGKENLKAMMRNSLHLGTSDSISDADIRRYEAVQRQNGQCLYCGSEITYHTCELDHIVPRKGPGSTNTRENLVATCSSCNAQKCNTPFATWCEQSTYCKNHDISADSAINRVRAFIFPPNSYDKRGANQFKKEVIARLKQKVGDEAFDNRSIESVAWMANELHRRIDWYYNSQNYQTNNGISDISNKAQTNVGVYAGSLTAIARRMSGIDGKLEFFDGRRKTRFDRRHHAVDASVIAMMTPGIAQILAIKCNLRETQLLQGNKVVPGGIDWKEYPTANDQGYQQYANWSVRMNALLKLLNEEMRADRIAVVNSIRLRYSNSSVHQYEVNALLKLHVGDEIDSETIRRSSTPALYCALTRNPDYDVNNGFPENPGRTILLHNKKLNADDSITFFKAQAVQLFVREGSAKIGNSIHHLRIYEYFEKLKSGKIKKSYGMIRVFQNDLHRHIHEDLFSCDLPEQSISMRYADTKVAHAVQTGNANYLGYLVPGDEIIVDFSHITLSENIGKFVEFLNKIGADCTAYRHWVVVGTDTEKVLILKPSMISSEGIDKLYSNCERNNFDYSSYEKSINEILAGKGWRVSVNVLAQYKAATIRRNALGEVRWASRSHLPISWSWDTGENRE

SEQ ID NO: 434 - protein, 1186 aa, Gardnerella vaginalis
MEGNISYAIGIDVGLNSVGLAAIRLDNNGEPIRILKAMSVIHDAGIDPNGAKESDTRKAISGVARRVRRLYRQRRRRLQKLDFLLHSLGFPVVENKDLDFSDSFIPWIFRAKLADEYIADEKQRKQMLSVAIRHIARHRGWRNPYQSIKSMTQETEYSEFYNELLKNIEKFAPGVGCEGSTPAQLVRDYLLLQQGKASRRLRITTDEKRKNHPNSLNPILPRKLMQSDNMLEILNIFNVQHIDDKYVREQIINAVFYAKSPRGSAENRVGKDAITGKGKRALKASLAFQKYRIISTISNLRIRENSKERCLTIEEKQSVYKLLTTSTDESSKEKSAEAPLYTWIDVADCLGIERYKLRGVGSQIGDGESVGNRPPMLNSELAIIYANNKSLGKSLLTWWLDANRTQEDKEALIEILSNTVDIEAIHDNPEYQDKYGSAIAFIDSMDETEIAALENISLPDGRAAYSLETLDKLNKQMLETDDDLFEARKKLFNLPNNWRPSEAPIAEPTGNPSVDRVLKIVHRFLISAKNRWGNPERINIEHVRSGFKSKKMANSYKELLDKRTKGKENLKAMMRNSLHLGMSDSISDADIRRYEAVQRQNGQCLYCGSEITYHTCELDHIVPRKGPGSTNTRENLVATCSLCNAQKCNTPFSTWCEQSTYCKNHDISVDSAINRVRAFIFPPNSYDKRGANQFKKEVIARLKQKVGDEAFDNRSIESVAWMANELHRRIDWYYNSQNYQTNNGISDITNKAQTNVGVYAGSLTAIARRMSGIDGKLEFFDGRRKTRFDRRHHAVDASVIAMMTPGIAQILAIKCNLRETQLLQGNKVVPGGIDWKEYPTANDQGYQQYANWSVRMNALLKLLNEEMRADRIAVVNSIRLRYNNSSVHQYKVNALLKLHVGDEIDSGTIRRSSTPALYCALTRNPDYDVNNGLPENPNRAILLHDKKLNADDSITFFKAQAVQLFVREGSAEIGSSTHHLRIYEYFKKLKSGKIKKSYGMIRVFQNDLHRHIHEDLFSCDLPEQSISMRYADTEVAHAVQTGNSNYLGYLVPGDEIIVDFSHVKLSGNIGTFVEFLNKIGANCAAYNHWVVVGTDTEKVLILKPSMISSEGIDKLYSNCKRNNFDYSSYEKSINEILVGKGWRVSVNVLAKYNAETIRRNALGEVRWTSRSHLPISWSWNTGENRE

SEQ ID NO: 435 - protein, 1258 aa, Gemella haemolysans
MTEENPDIRKVFLAIHHILKNRGHFLLQGQSFKEGNLNNLIKELLNLDILHISIEITEENINKITEIALEKKTLTDKVNDLKKIYPKEKQLLEAFRLIFGGKTSLDKLFAIDEYKELDASVKSVSFKEKIYEEVRHDYEQVLSNYIELLDLAKLVYDSIILSDIKKEGKTLSESKVELYHKHREDLTKLKTLVKNDSKLSEDKKVELYSAIFKEDKDKGTNYVNYIRKSEEGKGCNYEDFKKFLVKELAKLEESSAKEEILRDLELELFLPLQRTKDNSVVPYQIHKEELVKILDNAAKYHKFLNEKDDSGYSIIEKVIQLLEFRIPYYVGPLNSSKKAKVDGFAWSVRNKGYENTPVTPWNYEKVIDESASAEKFITNLTNKCTYLKGEDVLPKSSLLYSEFALLNELNALKYDGNRISLEARNVIIEKLFKEQGKKVTKTSIKNLLKAEGYIDGKGEITGIDITVKNDLKSYRDFKKILGDKFNTEHVENIILWITLYGESRKLIKAKIEAVYGDIYSKEEIAKMSRLVYKDWGRFSRKLLTELVSKKLYNEETGECLNIIGAMRQNNILFMELLADRFDYSQQIIDYNKELQKEVTEITPEILDDLYVSPSVKRSIWQTVRIVEELKKIIGCAPAKIFVETTRSNQDKKKPTDSRKKQLELFYKAVKKDVKDLEKEIGSLNFDKLNERLSSVEPSKLKAKKLYLYYTQLGRCMYSGETIDITQLNTTAYDIDHIYPQSKVKDDSFTNTVLVKREYNAAKTDRYPLGSDIQTPSNRRFWKFLKEKGLITDEKYNRLVRTEEFSDEELTGFIARQLVETSQSVKAVAGILGELNPKTSICYSKAENVSSFRQNFGKIKEGNRKSDNTEQLIKVREINDYHHAKDAYLNVVVGNVYDTKFTRNVFNFIKDKKDGRKYSLNNVFYENVSNSNNVAWELNKTVHQVEKVMNNNNILVTRRTSEQKGGLFDATVYKAKVAAKAKEGVYYPLKTSDPVVNDVTKYGGFTKVKIAYYSIFEYTLVNKKGEEKITRIIPIPIYVSQNIKDDSTLLEFGKTQINIKSGEEVKDFKLKYRKLCIGDLVKINNFFNFIGGKTNDSFVYDGAVQVTLDTESERYIKTLSKYQNWKKENKDGELWESITKEKNTELYNLLVEKMNSGIFIKKKPNKFNELNSEEIRNNFSSISLEEQAKVLLEVLNLLTNKKSIFDLKSINITAARGKISFNLSNLSQFSIIEQSVAGFYEKEITIIGDKENDMENNNC

SEQ ID NO: 436 - protein, 1054 aa, Haemophilus parainfluenzae
MENKNLNYILGLDLGIASVGWAVVEIDEKENPLRLIDVGVRTFERAEVPKTGESLALSRRLARSARRLTQRRVARLKKAKRLLKSENILLSTDERLPHQVWQLRVEGLDHKLERQEWAAVLLHLIKHRGYLSQRKNESKSENKELGALLSGVDNNHKLLQQATYRSPAELAVKKFEVEEGHIRNQQGAYTHTFSRLDLLAEMELLFSRQQHFGNPFASEKLLENLTALLMWQKPALSGEAILKMLGKCTFEDEYKAAKNTYSAERFVWITKLNNLRIQENGLERALNDNERLALMEQPYDKNRLFYSQVRSILKLSDEAIFKGLRYSGEDKKAIETKAVLMEMKAYHQIRKVLEGNNLKAEWAELKANPTLLDEIGTAFSLYKTDEDISAYLAGKLSQPVLNALLENLSFDKFIQLSLKALYKLLPLMQQGLRYDEACREIYGDHYGKKTEENHHFLPQIPADEIRNPVVLRTLTQARKVINGVVRLYGSPARIHIETGREVGKSYKDRRELEKRQEENRKQRENAIKEFKEYFPHFAGEPKAKDILKMRLYKQQNAKCLYSGKPIELHRLLEKGYVEVDHALPFSRTWDDSFNNKVLVLANENQNKGNLTPFEWLDGKHNSERWRAFKALVETSAFPYAKKQRILSQKLDEKGFIERNLNDTRYVARFLCNFIADNMHLTGEGKRKVFASNGQITALLRSRWGLAKSREDNDRHHALDAVVVACSTVAMQQKITRFVRFEAGDVFTGERIDRETGEIIPLHFPTPWQFFKQEVEIRIFSDNPKLELENRLPDRPQANHEFVQPLFVSRMPTRKMTGQGHMETVKSAKRLNEGISVIKMPLTKLKLKDLELMVNREREKDLYDTLKARLEAFNDDPAKAFAEPFIKKGGAIVKSVRVEQIQKSGVLVREGNGVADNASMVRVDVFTKGGKYFLVPIYTWQVAKGILPNKAATQYKDEEDWEVMDNSATFKFSLHPNDLVKLVTKKKTILGYFNGLNRATGNIDIKEHDLDKSKGKQGIFEGVGIKLALSFEKYQVDELGKNIRLCKPSKRQPVR

SEQ ID NO: 437 - protein, 1052 aa, Haemophilus parainfluenzae]
MKNTSLNYVLGLDLGISSVGWAVVEIDEKENPLSLIDVGVRTFERAETQKGESLALARRLARSARRLTQRRVARLKKAKRLLKSENILLSTDECLPHQVWQLRVEGLERKLERQEWAAVLLHLIKHRGYLSQRKNESKSENKELGALLSGVANNHKLLQQTTYRTPAELAVKKFEVEEGHIRNQQGSYTHTFSRLDLLSEMELLFSRQQHFGNPFTSEKLLENLTALLMWQKPALSGDAILKMLGKCTFENEYKAAKHTYSAERFIWITKLNNLRIQENGLERALNDNERLALMKQPYEKAKLTYAQVRSILNLSDEAIFKGLRYSGEDKKTSETKTVLMEMKAYHQIRLALEKNDLKTEWAELKVNSSLLDEIGTAFSLYKTDEDISTCLAGKLSQPVLNALLENLNFDKFIQLSLKALHKILPLMQQGLRYDEACAEIYGDHYGKKTEENHLLLPQIPADEIRNPVVLRTLTQARKVINGVVRLYSSPARIHIETGREVGKSYQDRRELEKRQEENRKQREKAISEIKTLFPNFSGEPKAKDILKMRLYYQQNAKCLYSGKPLELHRLLEQGYVEIDHALPFSRTWDDSFNNKVLVLANENQNKGNLTPFEWLDGKNNSERWKAFKALVETSAFPYTKKQRILSQKLDEKGFIERNLNDTRYVARFLCNFIADNMHLTGEGKRKVFASNGQITALLRGRWGLAKSREDNDRHHALDAVVVACSTVSMQQKITRFVRFEEGNVFTGERIDRETGEIIPLHFPAPWKFFREEVEIRIFSDNPKLELENRLIARPQANHEFVQPLFVSRMPTRKMIGQGHMETIKSAKRLNEGLSVIKMLLTKLRLKDLESMVNREREKELYEALKARLEAFNDEPAKAFAEPFMKKGGAIVKSVRVEQVQKSGVLVRDGNGVADNASMVRVDVFTKGGKYFLVPIYTWQVAKGILPNKAVIQGKNEEDWEVMDDATFRFSLHQNDLVKLVTKKKTIFGYFNGLNRATGNIDIKEHDLEKSKVKDGIHQSIGIKLALSFEKYQVDELGKNIRLCKSSKRQAVR

SEQ ID NO: 438 - protein, 121 aa, Haemophilus pittmaniae
MLNRRYAAKITRFVRFEAGDVFTGERIDRETGEIIPLHFPTPWQFFKQEVEIRIFSDNPKLELENRLPDRPQANHEFVQPLFVSRMPTRKMTGQGHMETVKSAKRLNEGISVIKMPLTKLN

SEQ ID NO: 439 - protein, 203 aa, Haemophilus pittmaniae
MVNREREKDLYDALKARLEAFNDDPAKAFAEPFIKKGGAIVKSVRVEQVQKSGVLVREGNGVADNASMVRVDVFTKDGKYFLVPIYTWQVAKGILPNKAATQYKDEEDWEVMDNSAIFKFSLHPNDLVKLVTKKKTILGYFNGLDRATGNIAIKEHDLEKSKAKGGIHQGVGIKLALSFEKYQIDELGKNIRLCNPSKCQSVR

SEQ ID NO: 440 - protein, 1052 aa, Haemophilus sputorum
MKNTSLNYVLGLDLGISSVGWAVVEIDEKENPLSLIDVGVRTFERAETQKGESLALARRLARSARRLTQRRVARLKKAKRLLKSENILLSTDECLPHQVWQLRVEGLERKLERQEWAAVLLHLIKHRGYLSQRKNESKSENKELGALLSGVANNHKLLQQTTYRTPAELAVKKFEVEEGHIRNQQGSYTHTFSRLDLLSEMELLFSRQQHFGNPFTSEKLLENLTALLMWQKPALSGDAILKMLGKCTFENEYKAAKHTYSAERFIWITKLNNLRIQENGLERALNDNERLALMKQPYEKAKLTYAQVRSILNLSDEAIFKGLRYSGEDKKTSETKTVLMEMKAYHQIRLALEKNDLKTEWAELKVNSSLLDEIGTAFSLYKTDEDISTCLAGKLSQPVLNALLENLNFDKFIQLSLKALHKILPLMQQGLRYDEACAEIYGDHYGKKTEENHLLLPQIPADEIRNPVVLRTLTQARKVINGVVRLYSSPARIHIETGREVGKSYQDRRELEKRQEENRKQREKAISEIKTLFPNFSGEPKAKDILKMRLYYQQNAKCLYSGKPLELHRLLEQGYVEIDHALPFSRTWDDSFNNKVLVLANENQNKGNLTPFEWLDGKNNSERWKAFKALVETSAFPYTKKQRILSQKLDEKGFIERNLNDTRYVARFLCNFIADNMHLTGEGKRKVFASNGQITALLRGRWGLAKSREDNDRHHALDAVVVACSTVSMQQKITRFVRFEEGNVFTGERIDRETGEIIPLHFPAPWKFFREEVEIRIFSDNPKLELENRLIARPQANHEFVQPLFVSRMPTRKMTGQGHMETIKSAKRLNEGLSVIKMLLTKLRLKDLESMVNREREKELYEALKARLEAFNDEPAKAFAEPFMKKGGAIVKSVRVEQVQKSGVLVRDGNGVADNASMVRVDVFTKGGKYFLVPIYTWQVAKGILPNKAVIQGKNEEDWEVMDDATFRFSLHQNDLVKLVTKKKTIFGYFNGLNRATGNIDIKEHDLEKSKVKDGIHQSIGIKLALSFEKYQVDELGKNIRLCKSSKRQAVR

SEQ ID NO: 441 - protein, 1338 aa, Helcococcus kunzii
MQDYYLGLDIGTNSVGWAVTDENYNLLRKKGKDLWGVRLFKEAQPATERRGHRSSRRRTIRKSLRKQLLRELFEEEINAIDKDFFLRLDESKYWLEDKKIEGKYSLFNDENFTDKDYYEKFPTIFHLRKALIESDDKEDIRLYFLAINQMMKRRGHFLIDGKLSNVEDITPFKECIQNLINEELDTEIETEFYDKAIKIVSDYSLKKTEKKNLIKDLVKETDSIEDSKKIINIFNLLISGKSKVNGIFDDEEILEKIKEDNKEDFYLTSEKYEENLEYFSQLLDYRFELISSLKSIYDYIILQEVLKGKKYLSYAQVERYKNHKEDLRKLKQLIKKYDKNGKIYYQIFRDENFKKGYVAYLGYYKKNKKNVPVKKCDYDTFSKNIKSTLDKICDKEDPLYIELIDKIEKGGFLLKQIVSTNSVIPHQVHELELDKILENLEKNYPSFKEISDGVSKIDKIKMIFNFRIPYYVGPLNDYHKDKVNSNTWIVKNEGFENENIRPWNFSKIVDEHACEEEFIKRMINECSYIPGEKVLPKSSLLYSEYMVLNELNNLRVNGDKLNPKIKKEIVENIYKKERKVTLKKIRNFLIINNYVDSKVEFSGLSDGIKANMSSYIDFAEILDDNFDNNMVEDLIEQITIHVGNVKLLTEKISNKYPNLEKKQINKIVNLKFKDWARFSRKLLVGIEGTEKETGEINTIIGFLRETNENFMELMSNRYTFSEEISEIKKKYIPNKLSKQIVDDLYVSPAVKKMIWQVLNINDELIKVLGKQPKKIFIEMARGKEEKPEVKDSRKNKLIELYKNLGKEGKEWLNRIEDKTEADFRNRALYLYYTQMGRCMYTGEIIDIERLYDKELYDLDHIIPRKMKKDDSIHKNLVLVTRNSNQYEKKDNYPVPEVIKSRENVRHLWYALKKKGLITEEKYNRLTRINPLSDKELSEFIERQLVETRQTTKVVKDLFENYYTDSKIVTVKAGLVSELRRDFEVLKCREINDLNHAHDAFLNIIVGDVWSKKFTSNPYNFVKKNREKYTLNNIFTKNQKDLRGNEIWNCAEGKKRIIKTLNKPSVLFSVENFEQTGQLFDQNIIGKQDYKEKTSYVPIKGDERLQDISKYGGYRGISGAYFFIVEHTEKNKRVKTIESLPIYMKSYVEENGLLDFCTNEMKLVDPKIIVKKLNYKSEIIVDGFKYLISGKTENRLSLETNEYLYWNHTQTTDIKKILNINEKIELEKYNGDIESERENIIKYIQIILEKFKLKPFIKRRNLPNIEINFADYETEKLLQLLVNLIPLTTKYVSPVDLTVISGSKYAGKVLIPKKISNLNEVIFISKSITGIYESRRRII

SEQ ID NO: 442 - protein, 1023 aa, Helicobacter cinaedi
MKIYSFDIGVASIGWAFIENEVLQDCGIRIFTKAENPKNGASLALPRREARGVRKRLARRRGRLNTIKQLLCKEFGLQLEDYLSNDGELPKAYTASKANPLKSPYELRTLALSQKLDSKDLVRVILHIAKHRGYGNKHAKDSKDTESGKVKKAIEFNRKTLAEKGYRSVGEYLYREFFQQSRISQNNGATEFINVRNKAGNYEHCVAQDMLKEELESILNAQRQFGFSLKQDFENKLLTKIFEQRPLKSFADKVGNCCFIAGEKRTPKDSLSAIEFIALSRTINTLINLSKESGEIYNRAIILQIVESTLKKGEISYKELREIIRLDERLRFKDPRLDYSREIKEAEKVKFLEFKQLKGFKKALGESFTTLARSQLDEIAEHIALIKDRVKLNEKLESYALTKEQREALSNLSFSAHINLSLQALKQILPFMRGDNGEQCLDYDESVEKAGLKALSKDTLKGQMLPPLNEFEPYLSNPVVARALAEYRKVLNALLKQYGSPHKIHIEYAREAKLSSTERQKYEKEQKDNYAANQAAHKKCQELGLEPSSTNLLKLKLWQEQGGLCLYSGAKITISYLQDPTALQVDHIYPYSRSFDDSYMNKCLVLTKANQEKGNRTPFEAFGTDSAKWGVITTLAQKLPHKKRRRILNTAFNDKEAGFKLRNLNDTSYIARLVADYTETYLEFLPLVESENTTLGKGQKGSKKHIAIVNGALTSTMRYYLGFASKDRDNHLHHALDAVIIGFMNDSVIKAFSDFKKTQETSKAAYYAHTLSKQEYKKQRAFIQLPSGENFRASVLEKVESVFVSKPPRKRVRGALHEATFYSPNDPKLLKNYGGTKGVERALALGKMRKVGAKIVSNGAMVRVDIFRHKSSGKFYGVPVYTMDFALGILPNKAVVVGKDKNGVIKDWLEMDSSYEFIFSLYKDDLLLVQKKEMAEPELCYFMSFNSSIAQISVAKHDNNFSTLTKNQKLLFSNATQEDVSGKSIGIQNLQVFEKWQVSVLGEVKRTQSYPRENISLASKAKK

SEQ ID NO: 443 - protein, 1023 aa, Helicobacter cinaedi
MKIYSFDIGVASIGWAFIENEVLQDCGIRIFTKAENPKNGASLALPRREARGVRKRLARRRGRLNTIKQLLCKEFGLQLEDYLSNDGELPKAYTASKANPLKSPYELRTLALSQKLDSKDLVRVILHIAKHRGYGNKHAKDSKDTESGKVKKAIEFNRKTLAEKGYRSVGEYLYREFFQQSRISQNNGATEFINVRNKAGNYEHCVAQDMLKEELESILNAQRQFGFSLKQDFESKLLTKIFEQRPLKSFADKVGNCCFIAGEKRAPKDSPSAIEFIALSRTINTLINLSKESGEIYNRAIILQIVESTLKKGEISYKELREIIRLDERLRFKDPRLDYSREIKEAEKVKFLEFKQLKGFKKALGESFTTLAISQLDEIAEHIALIKDRVKLNEKLESYALTKEQREALSNLSFSAHINLSLQALKQILPFMRGDNGEQCLDYDESVEKAGLKALSKDTLKGQMLPPLNEFEPYLSNPVVARALAEYRKVLNVLLKQYGSPHKIHIEYAREAKLSSTERQKYEKEQKDNYAANQAAHKKCQELGLEPSSTNLLKLKLWQEQGGLCLYSGAKITISYLQDPTALQVDHIYPYSRSFDDSYMNKCLVLTKANQEKGNRTPFEAFGTDSAKWGVITTLAQKLPHKKRRRILNTAFNDKEAGFKLRNLNDTSYIARLVADYTETYLEFLPLVESENTTLSKGQKGSKKHIAIVNGVLTSTMRYYLGFASKDRDNHLHHALDAVIIGFMNDSVIKAFSDFKKTQETSKAAYYAHTLSKQEYKKQRAFIQLPSGENFRVSVLEKVESVFVSKPPRKRVRGALHEATFYSPNDPKLLKNYGGTKGVERALALGKMRKVGAKIVSNGAMVRVDIFRHKSSGKFYGVPVYTMDFALGILPNKAVVVGKDQNGVIKDWLEMDSSYEFIFSLYKDDVILVQKKEMQRPELCYFVSFDTSGASIKVAKHDNNFSTLTENQKLLFSNATKEEVVGKSIGIQNLKVFEKWQVSVLGEVKRTQSYPRENISLASKAKK

SEQ ID NO: 444 - protein, 344 aa, Helicobacter pullorum
MKILGFDIGIASIGWAFVENGELKDCGVRIFTKAENPKTGDSLAMPRREARSVRRRLARRKGRLETLKRLLAKEWDLCYEDYIAADGELPKAFMGKNLTNPYVLRYEALQRLLSKEELVRVVLHIAKHRGYGNKNAKITKSEESKREQGKILSALATNASVIARYRTVGEYFYKEFCEVIKNPQGLNTNENCTQPKVRVLKPIRNKGGEYTNCILQEDLQRELRCIFEHQKGFGFSITQEFQDKILKIAFYQRSLKDFSHLVGKCTFYPDEPRAPKFSLSAIEFITKAKAINLLASIAKESGEVWDKEQWRERLDSVFSAVCERGINTIPSSSHFLNIFDILYL

SEQ ID NO: 445 - protein, 1688 aa, Ignavibacterium album
MEFKKVLGLDIGTNSIGCALLSLPKSIQDYGKGGRLEWLTSRVIPLDADYMKAFIDGKNGLPQVITPAGKRRQKRGSRRLKHRYKLRRSRLIRVFKTLNWLPEDFPLDNPKRIKETISTEGKFSFRISDYVPISDESYREFYREFGYPENEIEQVIEEINFRRKTKGKNKNPMIKLLPEDWVVYYLRKKALIKPTTKEELIRIIYLFNQRRGFKSSRKDLTETAILDYDEFAKRLAEKEKYSAENYETKFVSITKVKEVVELKTDGRKGKKRFKVILEDSRIEPYEIERKEKPDWEGKEYTFLVTQKLEKGKFKQNKPDLPKEEDWALCTTALDNRMGSKHPGEFFFDELLKAFKEKRGYKIRQYPVNRWRYKKELEFIWTKQCQLNPELNNLNINKEILRKLATVLYPSQSKFFGPKIKEFENSDVLHIISEDIIYYQRDLKSQKSLISECRYEKRKGIDGEIYGLKCIPKSSPLYQEFRIWQDIHNIKVIRKESEVNGKKKINIDETQLYINENIKEKLFELFNSKDSLSEKDILELISLNIINSGIKISKKEEETTHRINLFANRKELKGNETKSRYRKVFKKLGFDGEYILNHPSKLNRLWHSDYSNDYADKEKTEKSILSSLGWKNRNGKWEKSKNYDVFNLPLEVAKAIANLPPLKKEYGSYSALAIRKMLVVMRDGKYWQHPDQIAKDQENTSLMLFDKNLIQLTNNQRKVLNKYLLTLAEVQKRSTLIKQKLNEIEHNPYKLELVSDQDLEKQVLKSFLEKKNESDYLKGLKTYQAGYLIYGKHSEKDVPIVNSPDELGEYIRKKLPNNSLRNPIVEQVIRETIFIVRDVWKSFGIIDEIHIELGRELKNNSEERKKTSESQEKNFQEKERARKLLKELLNSSNFEHYDENGNKIFSSFTVNPNPDSPLDIEKFRIWKNQSGLTDEELNKKLKDEKIPTEIEVKKYILWLTQKCRSPYTGKIIPLSKLFDSNVYEIEHIIPRSKMKNDSTNNLVICELGVNKAKGDRLAANFISESNGKCKFGEVEYTLLKYGDYLQYCKDTFKYQKAKYKNLLATEPPEDFIERQINDTRYIGRKLAELLTPVVKDSKNIIFTIGSITSELKITWGLNGVWKDILRPRFKRLESIINKKLIFQDEDDPNKYHFDLSINPQLDKEGLKRLDHRHHALDATIIAATTREHVRYLNSLNAADNDEEKREYFLSLCNHKIRDFKLPWENFTSEVKSKLLSCVVSYKESKPILSDPFNKYLKWEYKNGKWQKVFAIQIKNDRWKAVRRSMFKEPIGTVWIKKIKEVSLKEAIKIQAIWEEVKNDPVRKKKEKYIYDDYAQKVIAKIVQELGLSSSMRKQDDEKLNKFINEAKVSAGVNKNLNTTNKTIYNLEGRFYEKIKVAEYVLYKAKRMPLNKKEYIEKLSLQKMFNDLPNFILEKSILDNYPEILKELESDNKYIIEPHKKNNPVNRLLLEHILEYHNNPKEAFSTEGLEKLNKKAINKIGKPIKYITRLDGDINEEEIFRGAVFETDKGSNVYFVMYENNQTKDREFLKPNPSISVLKAIEHKNKIDFFAPNRLGFSRIILSPGDLVYVPTNDQYVLIKDNSSNETIINWDDNEFISNRIYQVKKFTGNSCYFLKNDIASLILSYSASNGVGEFGSQNISEYSVDDPPIRIKDVCIKIRVDRLGNVRPL

SEQ ID NO: 446 - protein, 1354 aa, Indibacter alkaliphilus
MKKILGLDLGTTSIGWAFIKEPEKDVVGSEIVDMGVRIVPLSSDEENDFAKGNTISINADRTLKRGARRNLQRFKQRRNALLETFKEKNLIPSNFQYAEDGPSSTFSTLKLRDKAAKEKIELDDFVKVLLQINKKRGYKSSRKAMSEEDEGTAIDSMGIAKELYENDLTPGQWVYEALKNGRKNVPDFYRSDLQEEFKKIVNYQSEFYPDILNTSFVEDWMGKASTPTKQYFNKRGVQLAENKGKREERRLQEYKWRAEAVNFKIDLSEIALILSQINSQISNSSGYLGAISDRSKELYFKNLTVGQYLYQQVKKNPHTRLKGQVFYRQDYLDEFEKIWSVQSSFYPQLNDELKQEVRDVTIFFQRRLKSQKHLISNCEFEEHHKVVPKSHPIFQEFRIWQNLNNLTLIKKDNLNEKCELALEDKTALANELAFKKELSVKDALKVLGLKPSDWEFNFTKIEGNRTNHAFFEAFAKIIELEDGEPIDLGNLKADDILDQFSEAFLRIGIDTELLQVNSDIEGAEYEKQSYIQFWHLLYSSEDDQKLKQNLIRKFGFKPEHAKILASISLQDDHASLSSRAIKKILPHLQSGLIYDKACTYAGYNHSSSFTKDENEKRELRAELELLKKNSLRNPVVEKILNQMINVVNAILKDPNLGRPDEIRVEMARELKANAEQRKNMTSNIASATRDHEKYREILKKEFGLKRVTKNDLLRYKLWLETDGISLYTGKPIEASKLFSKEYDIEHIIPKARLFDDSFSNKTICERQLNIDKANVTAFSFLQNKLSADEFEQYQSRVKSLYGKLSKAKIQKLLMANDKIPEDFIARQLQETRYISKKAKEILFEITMRVSVTTGTITDKLREDWGLVEIMKELNWEKYDKLGLTYTIEGKHGERLNKIKDWNKRNDHRHHAMDALTVALTKPAYIQYLNNLNAKAIGNKKGTEIFAIEQKYLKRENGKLCFIPPIENIRAEAKKHLSKILVSYKAKNKVVTINKNKTKKKAGFNEQTALTPRGQLHKETVYGKSFHYSTKFEKIGASFDAQKINTVAKKEEREALLKRLAENGNDPKKAFTGKNSLNKMPIYLDLGKNIKLSEKVKTVVLEQNYTIRKNIDPDLKVDKVIDVGIKRILESRLEEFGGNAKLAFSNLEENPIWLNKEKGIPIKRVKISGVSNVESLHVKKDHFGEKILDEEGNEIPVDFVSTGNNHHVAIYEDEDGNLQDEVVNFYEAVIRRNQGESIIKYRHEEGWNFLYSIKQNEFFVFPSQDFNPNDFDLLDPKNYDLISPNLYRAQKFSKVMYGNSAVRDYVFRHHLETVLNDVKELKDVAYKQLKSLQYLNGIKKVRLNHLGQIIQVGEY

SEQ ID NO: 447 - protein, 1397 aa, Joostella marina
MKKVLGLDLGTNSIGWALVNEATKEEKKEGKSSEIIKLGVRVNPLTVDEKTNFEKGRPLSTNADRTLKRSARRNLQRYKLRRRNLIEILIKNGFITKDTPLTETGKDTTHQTLKLRAKSAKEKVDLKDFAKILLTINKKRGYKSSRKVNSDEDGLAIDGMAVAKHLYEQNLTPGQYVLNLLQKNKKYVPDFYRSDLQEEFKNIWNNQKTYYFDILTDTLFEELKDKNKSQTWAICKKPFDIAGIKQIGKASDKRLERYKWRTEGLTQKLNLEYLAIALQEINNDINKSSGYLGAISDRSKELFFNKETVGENLYRQLVKTPHTSLRNQVFYRQDYLDEFETIWETQAKFYPQLTHTLKEEIRDVIIFYQRKLKSQKSLISFCQFESWEQTYIEKETGKSKTRTVGRKVIPKSSPLFQEFKIWQNLNSLEFRNSDEGEIIEFIKLDEDIRQTVFEELNLRGNLKPNDVLKILGNYISLGKVSQWKCNFEEIEGNRTNAALYNVYQIIAENEGYGFDWAKKTASEINKELKNIFPQLGIDASILDFDFTQANFDKQTSYQLWHLLYSAEEDFKISEEDKVLYGNSSVSLKKKLHQKYGFKPEYTKLLTNISLQPDYGNLSAKAICNILPYLKENNVYSEACDLTGYNHSNFLTAEEQAKRPLKPILELLKKNSLRNPVVEKILNQMVNVVNQVIETYGKPDEIRIELTRELKKSAKERANMTKSIADATRRNDDYRKTIIKEFGIPNPTKSDVVRYRLWQELASRGYKDIFTDTEIKPQELFSNKIDIEHIIPKALLFDDSFSNKTLAFKKDNLKKANRTAYDFIANDYAPNLENYIERVESLHKDRKITRAKRNKLLMLQSKLPDGFIERDLRNSQYITKEAKKMLYEVCRTVVSTSGSITDKLREDWDLINVMKELNFPKYKALGLTEKIERYDIGAEKMKEVEIIEDWNKRNDHRHHAIDALTVAFSTHSHIQYLNHLNARRDEGHKKHAAIIAIESTITEKEGNKKRRFIAPLPNFRLQAKEHIESILVSFKNKNKVVTNNINKTKRIKKDKFNTKVQLTPRGQLHKETIYGKIKQPLEKHIKLNKSFTLEQAKLIIDKRQREKVLNHLEKYAHNSDIAFNSKTLKKNPLLISDEPLKEVLCFEEVFTIRKDISYDNFKNEKQLDKVIDEKVKQALKERINQYNGDFREAFSDIERNPIWLNKAKGICVKRATIKGVSNAEPLHTAKNHLGEEVLTENKEQIPVDYVSTGNNHHVAIYEDEDGNLQEKVVSFYEAVIRVNEGLPIIDKEYNKSLGWTFKFTMKQNEMFVFPSEDFNPTEIDLLDQKNASLISPNLFRVQKFTIKDYFFRHHLETTVENNNTLKNTTWRREGLSGIYGIIKIRLNHLGEIVQVGEY

SEQ ID NO: 448 - protein, 1060 aa, Kingella kingae
MAAKSLNYILGLDLGIASCGWAVVEMDEQENPLRLIDVGVRTFEEAENPKDGSSLAETRRLARAQRRLISRRANRMNKLCRLLKQENVLQANDYDEKGLIIGLPNQAWELRAQGLDRKLEPKEWAAVLIHLVKHRGYLSQRKNESQTADKELGALLSGMNHNHQLLQSQSNQYRTPAELAIKQFATQDGHIRNQRGAYTHTFNRLDLQNELNQLFDAQTRLGNPHVSGSLKTAINDLLMNQKAALSGDAILEMLGRCTFEPSEYKAAKNTYSAERFVWLGKLTNLRIQDNGLESALSREQRELLLNEPYNKTKLTYQQVRKLLRLPETAFFKGLRYGKDNAESATFMEMKSYHAIRKSLENKSLKSEWEKLKTQPKLLDLIGTAFSIYKTDDEIAGCLKNQLPENVIIALQGQLNFSNFMELSLKALEKLLPLMEQGLRYDEACTQIYGNRHEKIADKTEKFLPNIPADKLRNPVVLRTLTQARKVINAIIRRYGSPARVHIETGREVGKSFSDRDKLKKQQEENQEQRRRAIDEWKQFFPNAAHEPKAVDILKLRLYQLQQGKCLYSGLPIDVRRLPEKGYVEIDHALPFSRTWDDSFNNKILVLASENQNKGNQTPYEYLRGADNSESWRLFVENVQNCQFSPNKKQKIMAKQLDEKGFLERNLNDTRYVSRFLCQFISEHLHLTGKGKKRVFASNGQITALLRGRWGLSKNREENDRHHAVDAVVVACSTVAMQQKITQFVRYQKGNVFTGERIDKETGEVISIHFPTPWEHFREEVMIRVFDDNPLRTLPEKLPNRPEALHEYVMPLFVSRMPTRKMTGQGHKETIKSAKRLDEKISVLRVPLTQLKLNDLENMVNREREPALYEALKARLEQFKNDPAKAFAEPFFKQGGQQVKAVRVEIVQKSGMLLRKINGVADNGSMVRVDVFEKSGKFYLVPIYAWQVAEGILPNYAVVAHKDESDWILMDESYHFKFALYKNDLLEVQTKKGGIMGYFASLDRATGAITIREHDRDKKKCKDGEHRSIGVKMASSFKKLQVDELGKNIHETRSRKRPNIG

SEQ ID NO: 449 - protein, 1314 aa, Lactobacillus animalis
MLKKDYSIGLDIGTNSVGHAVVTDDYKVPTKKMKVFGDTSKKTIKKNMLGVLLFNEGQTAADTRLKRGTRRRYTRRKNRLRYLQEIFAPELAKVDPNFLYRLEESSLVAEDKKYDVYPIFGKREEELLYHDTYKTIYHLRSALANNDQPADLRLVYLALAHIIKYRGNFLLEGEIDLRTTDINKVFAEFSETLNENSDENLGKLDVADIFKNNTFSKTKKSEELLKLSGAKKNQLAHQLFKMMVGNMGSFKKVLGTDEEHKLSFGKDTYEDDLNDLLAEAGDQYLDIFVAAKKVYDAAILASILDVKDTQTKTVFSQAMIERYEEHQKDLIELKRVFKKYLPEKCHDFFSEPKISGYAGYIDGKVSEEDFYKYTKKTLKGIPETEEILQKIDANNYLRKQRTFDNGAIPHQVHLKELVAIVENQGKYYPFLRENKDKFEKILNFRIPYYVGPLARGNSKFAWLTRAGEGKITPYNFDEMIDKETSAEDFIKHMTINDLYLPTEPVLPKHSLLYERYTIFNELAGVRYVTENGEAKYFDAQTKRSIFELFKLDRKVSEKMVIKHLKVVMPAIRIQALKGLDNGKFNASYGTYKDLVDMGVAPELLNDEVNSEKWEDIIKTLTIFEGRKLIKRRLENYRDFLGEDILRKLSRKKYTGWGRLSAKLLDGIYDKKTHKTILDCLMTEDYSQNFMQLINDDNYSFKETIKNAQVIEKEETLAKTVQELPGSPAIKKGILQSLEIVDEIIKVMGYKPKSIVVEMARETQKTHGTRKREDRVQQIVENLKDANELPEKLPSNAELSDERKYLYCLQNGRDMYTGAPLDYDHLQFYDVDHIIPQSFLKDDSIENKVLTIKKENVRKTNGLPSEAVIQKMGSFWKKLLDAGAMTNKKYDNLRRNLHGGLNEKLKERFIERQLVETRQITKYVAQLLDQRLNYDGNGVELDEKIAIVTLKAQLASQFRSEFKLRKVRALNNLHHAHDAYLNAIVANLIMAKYPELEPEFVYGKYRKAKFKGLGKATAKNTLYANVLYFLKENEVYPFWDKARDLPTIKRYLYRAQVNKVRKAERQIGGFSDEMLVPKSDSGKLLPRKEGLDPVKYGGYAKAVESYAVLITADEVKKGKTKKVKTLVNIPIIDSKKYEADPTAYLASRGYTNVTNSFILPKYSLLEDPEGRRRYLASFKEFQKANELILPQHLVELLYWVNAKDGEQKLEDHKAEFKELFDKIMEFADKYVVAPKNSEKIRRLYEENQDATPMELGKNFVELLRYTADGAASDFKFFGENIPRKRYNSAGSLLNGTLIYQSKTGLYETRIDLGKL

SEQ ID NO: 450 - protein, 1371 aa, Lactobacillus buchneri
MKVNNYHIGLDIGTSSIGWVAIGKDGKPLRVKGKTAIGARLFQEGNPAADRRMFRTTRRRLSRRKWRLKLLEEIFDPYITPVDSTFFARLKQSNLSPKDSRKEFKGSMLFPDLTDMQYHKNYPTIYHLRHALMTQDKKFDIRMVYLAIHHIVKYRGNFLNSTPVDSFKASKVDFVDQFKKLNELYAAINPEESFKINLANSEDIGHQFLDPSIRKFDKKKQIPKIVPVMMNDKVTDRLNGKIASEIIHAILGYKAKLDVVLQCTPVDSKPWALKFDDEDIDAKLEKILPEMDENQQSIVAILQNLYSQVTLNQIVPNGMSLSESMIEKYNDHHDHLKLYKKLIDQLADPKKKAVLKKAYSQYVGDDGKVIEQAEFWSSVKKNLDDSELSKQIMDLIDAEKFMPKQRTSQNGVIPHQLHQRELDEIIEHQSKYYPWLVEINPNKHDLHLAKYKIEQLVAFRVPYYVGPMITPKDQAESAETVFSWMERKGTETGQITPWNFDEKVDRKASANRFIKRMTTKDTYLIGEDVLPDESLLYEKFKVLNELNMVRVNGKLLKVADKQAIFQDLFENYKHVSVKKLQNYIKAKTGLPSDPEISGLSDPEHFNNSLGTYNDFKKLFGSKVDEPDLQDDFEKIVEWSTVFEDKKILREKLNEITWLSDQQKDVLESSRYQGWGRLSKKLLTGIVNDQGERIIDKLWNTNKNFMQIQSDDDFAKRIHEANADQMQAVDVEDVLADAYTSPQNKKAIRQVVKVVDDIQKAMGGVAPKYISIEFTRSEDRNPRRTISRQRQLENTLKDTAKSLAKSINPELLSELDNAAKSKKGLTDRLYLYFTQLGKDIYTGEPINIDELNKYDIDHILPQAFIKDNSLDNRVLVLTAVNNGKSDNVPLRMFGAKMGHFWKQLAEAGLISKRKLKNLQTDPDTISKYAMHGFIRRQLVETSQVIKLVANILGDKYRNDDTKIIEITARMNHQMRDEFGFIKNREINDYHHAFDAYLTAFLGRYLYHRYIKLRPYFVYGDFKKFREDKVTMRNFNFLHDLTDDTQEKIADAETGEVIWDRENSIQQLKDVYHYKFMLISHEVYTLRGAMFNQTVYPASDAGKRKLIPVKADRPVNVYGGYSGSADAYMAIVRIHNKKGDKYRVVGVPMRALDRLDAAKNVSDADFDRALKDVLAPQLTKTKKSRKTGEITQVIEDFEIVLGKVMYRQLMIDGDKKFMLGSSTYQYNAKQLVLSDQSVKTLASKGRLDPLQESMDYNNVYTEILDKVNQYFSLYDMNKFRHKLNLGFSKFISFPNHNVLDGNTKVSSGKREILQEILNGLHANPTFGNLKDVGITTPFGQLQQPNGILLSDETKIRYQSPTGLFERTVSLKDL

SEQ ID NO: 451 - protein, 315 aa, Lactobacillus casei
MFKDYLKQLEDDGTAKAIRQLYDRYIDGDDAKPFVREDFVKALTKEVTAHPNAKSPELLERLAQPDFMLKQRNKANGAIPVQMQQRELDQIIKNQSVYYDWLAAPNPVEKHRKSMPYQLDELLNFRIPYYVGPLVTAKEQKAARGGVFAWMVRKDPDGNITPYNFDEKVDREASANTFIQRMKTTDTYLIGEDVLPKQSLLYQSYEVLNELNNVRVNDNKLSFDQKQQVLGELFERHNTVTIKQFVDNLLAHGDYDRIPEVRGLADEKRFLSSLSTYNQLKGILHEAIDDSDKQTDMVDCKINPNAVRTKKISFL

SEQ ID NO: 452 - protein, 236 aa, Lactobacillus casei
MFKDYLKQLEDDGTAKAIRQLYDRYIDGDDAKPFVREDFVKALTKEVTAHPNAKSPELLERLAQPDFMLKQRNKANGAIPVQMQQRELDQIIKNQSVYYDWLAAPNPVEKHRKSMPYQLDELLNFRIPYYVGPLVTAKEQKAARGGVFAWMVRKDPDGNITPYNFDEKVDREASANTFIQRMKTTDTYLIGEDVLPKQSLLYQSYEVLNELNNVRVNDNKLSSSIFKSSATMITNS

SEQ ID NO: 453 - protein, 1389 aa, Lactobacillus casei
MIIRTYELKTITTIAILKMFQLLTGGLSMTKLGKPYGIGVDIGSNSIGFAAVDENSHLIRLKGKTVIGARLFEEGKAAADRRASRTTRRRLSRNRWRLSFLRDFFESHITPTGPNFFMRQKYSEISPKDKARYKYEKRLFNDRTDAEFYQQYPTMYHLRNRLLTDPSKADVREIYFAIHHILKSRGHFLTSGYAKDFNTNKVALNEIFPALQDAYAQVYPDLDITFDENKVNEFKTVLLNEKATPSDTQRALVNLLLAEDGDKDILKQQKQVLTEFAKAVVGLKTKLNVALGTEVDSSEATVWNFSLGQLDDKWAGIESAMTDEGTEILDQIRDLYRARLLNGIVPAGKTLSQAKVDDYAQHHEDLELFKDYLKQLEDDGTAKAIRQLYDRYIDGDDAKPFVREDFVKALTKEVTAHPNAKSPELLERLAQPDFMLKQRNKANGAIPVQMQQRELDQIIKNQSVYYDWLAAPNPVEKHRKSMPYQLDELLNFRIPYYVGPLVTAKEQKAAQGGVFAWMVRKDPDGNITPYNFDEKVDREASANTFIQRMKTTDTYLIGEDVLPKQSLLYQRYEVLNELNNVRVNNEKLSIEQKQQVIRELFERHNSVTIKQFAENLRAHGDYAHIPEIRGLADEKRFLSSLSTYRQLKSLLPDAIDDPAKQADIENIIAWSTVFEDAAIFKTKLKEINWLDSQTITKLSNIRYRGWGQFSHKFLNGLTLGNGHTIIQELFLSNNNLMQILTDETLQKKMTELNADKLKAANINDAIDDAYTSPSNKKALRQVLRVIEDIKRAADGQDPSWLYVETADGGGTPGKRTRARQHQLQEIYANAAHELIDSAVRGELEDKIADKADFNDRLVLYFMQGGRDIYTGTPLNIDQLSSYDIDHILPQSLIKDNSLDNRVLVHAIINREKNATFASTIYAQKMNATWRQWHEAGLISGRKLRNLQMRPDQIDKYASGFVARQLVETRQIIKLTEQIVAAQYPETKIIAVKAGLSHQLREELEFPKNRDVNHYHHAFDAFLAARIGTYLLKRFPNLQAFFTYGKFKKADVKKLRGFNFIRDITHAEDKIVVKDTGEVIWDKKRDVDELDRIYNFKRMLITHEVHFEKADLFKQTVYGAKDSKEAGGKKQLISKKKGYPVDIYGGYTQETGSYLSVVRLTKKAMYAVVKVSTRDAAKLAVAKSISEQKENETLNDIIDEKLSKISKNGKITHELFEVVLPRVGQKTLFKNSKYNLFLVNSDTYMHNYQELWMPREYQKMWKDISLSKYGDAQTEDQLDQIFGFIVSQVNSYFNLYDINQFRKKLNDAADKFATLPMRDTDDMQGKIATIGQLLIGLQANAARSDLRNLDIKTPLGLLQIPNGISLDSDTSVVYQSPTGLLEREVHLSDL

SEQ ID NO: 454 - protein, 412 aa, Lactobacillus casei
MIKDNSLDNRVLVHPLVNREKDTIFASTRFAKQTNGMWRQWHAAGLISSRKLRNLQMRPDEIDKYASGFVARQLVETRQIIKLTEQIVADQYPDTKIIAVKAGLSSQLRKELDFPKNREVNHYHHAFDAFLAARIGTYLLKRYPNLEPFFTYGKFKKTEVKKLKSFNFIRDMTHAKDKIVAKETGEIVWDNASDINELDRIYNFKRMLITHEVRFETASLFKQTLYAAKNPKNRGGSRQLIPKKKGYLVDIYGGYTQETGSYLSVVRLTKKAMYAVVKVSTRDAAKLAVAKSISEQKENETLKKIIDGKLSKTSKKGKTTHQLFEIVLPRVGQKTLFKNSKYNQFLVNSDTYMHNYQELWMPREYQRMWKDILLSNHGDAQIEGQLDQIFKFIVSQVNSYFNLYDINQFRKK

SEQ ID NO: 455 - protein, 234 aa, Lactobacillus casei
MKVTKKTETIFKVVKIATSQVAALNKARSRSTAEELSVLTELLKPKFSKVGKNGKITDTPFEVVLPRVPREQLFYNAKYGFFMVNSDTMFHNFQEIWVSRSDQKILQQIRKAKIDYPNVDQDLDNLFHNLADQIVKYFDLYSIAGFKEKISQSQNTFNDLAVDDTDQSVGKITVINELLKGAQANGMTGSLKVLKISTPFGFTQDKSGVLTKDSSIIYQSPTGLFERSVRLTDL

SEQ ID NO: 456 - protein, 566 aa, Lactobacillus casei
MQILTDEVLKQKIAELNAHELKASGIYAAIDDAYTSPSNKKALRQVLSVIDDITNAAGQAPNWLYIETADGDGVPGKRTNSRQRKIQEIYVNAAQELITSSVRGELEDKIASRADFTDRLVLYFMQGGRDIYTGEPLNIDNLSSYDIDHILPQSLIKDNSLDNRVLVHPLVNREKDTIFASTRFAKQMNGMWRQWHAAGLISSRKLRNLQMRPDEIDKYASGFVARQLVETRQIIKLTEQIVADQYPDAKIIAVKAGLSSQLRKELDFPKNREVNHYHHAFDAFLAARIGTYLLKRYPNLEPFFTYGKFKKTEVKKLKSFNFIRDMTHAKDKIVAKETGEIVWDNASDINELDRIYNFKRMLITHEVRFETASLFKQTLYAAKNSKNRGGSRQLIPKKKGYLVDIYGGYTQETGSYLSVVRLTKKAMYAVVKVSTRDAAKLAVAKSISEQKENETLKKIIDGKLSKTSKKGKTTHQLFEIVLPRVGQKTLFKNSKYNQFLVNSDTYMHNYQELWMPREYQRMWKDILLSNHGDAQLEGQLDQIFKFIVSQVNSYFNLYDINQFRKK

SEQ ID NO: 457 - protein, 1363 aa, Lactobacillus casei
MTKLGKPYGIGVDIGSNSIGFAAVDENSHLIRLKGKTVIGARLFEEGKAAADRRASRTTRRRLSRNRWRLSFLRDFFESHITPTDPNFFMRQKYSEISPKDKARYKYEKRLFNDRTDAEFYQQYPTMYHLRNRLLTDPSKADVREIYFAIHHILKSRGHFLTSGYAKDFNTNKVALNEIFPALQDAYAQVYPDLDITFDENKVNEFKTVLLDEKATPSDTQRALVNLLLAEDGDKDILKQQKQVLTEFAKAVVGLKMKLNVALGTEVDSSEATAWNFSLGQLDDKWAGIESAMTDEGTEILDQIRDLYRARLLNGIVPAGKTLSQAKVDDYEQHHEDLELFKDYLKQLEDDGMAKVIRQLYDRYIDGDDAKPFVREDFVKALTKEVTAHPNAKSPELLERLVQPDFMLKQRNKANGAIPVQMQQRELDQIIKNQSVYYDWLAAPNPVEKHRQSMPYQLDELLNFRIPYYVGPLVTAKEQKAAQGGVFAWMVRKDPDGNITPYNFDEKVDREASANTFIQRMKTTDTYLIGEDVLPKQSLLYQSYEVLNELNNVRVNDNKLSFDQKQQVLGELFERHNTVTIKQFVDNLLAHGDYDRIPEVRGLADEKRFLSSLSTYNQLKGILHEAIDDSDKQTDIEKIIAWSTIFEDKAIFKTKLNEISWLTAGMINSLANIRYRGWGQFSHKLLNELTLSTGRTVFEELLISSHNLMQILTDEVLKQKIAELNAHELKASGIYAAIDDAYTSPSNKKALRQVLSVIDDITNAAGQAPNWLYIETADGDGVPGKRTNSRQRKIQEIYANAAQELITGSVRGELEDKIASRADFTDRLVLYFMQGGRDIYTGEPLNIDNLSSYDIDHILPQSLIKDNSLDNRVLVHPLVNREKDTIFASTRFAKQMNGMWRQWHAAGLISSRKLRNLQMRPDEIDKYASGFVARQLVETRQIIKLTEQIVADQYPDAKIIAVKAGLSSQLRKELDFPKNREVNHYHHAFDAFLAARIGTYLLKRYPNLEPFFTYGKFKKTEVKKLKSLKSFNFIRDMTHAKDKIVAKETGEIVWDNASDINELDRIYNFKRMLITHEVRFETASLFKQTLYAAKNSKNRGGSRQLIPKKKGYLVDIYGGYTQETGSYLSVVRLTKKAMYAVVKVSTRDAAKLAVAKSISEQKENETLKKIIDGKLSKTSKKGKTTHQLFEIVLPRVGQKTLFKNSKYNQFLVNSDTYMHNYQELWMPREYQRMWKDILLSNHGDAQLEGQLDQIFKFIVSQVNSYFNLYDINQFRKKIADATDKFAKLPTHDTDNARGKIATIGQLLIGLQANAMRSDLRNLDIKTPFGLLQIGTGITLDLDTSIIYQSPTGLFEREVPLTDL

SEQ ID NO: 458 - protein, 1360 aa, Lactobacillus casei
MTKLGKPYGIGVDIGSNSIGFAAVDENSHLIRLKGKTVIGARLFEEGKAAADRRASRTTRRRLSRNRWRLSFLRDFFESHITPTDPNFFMRQKYSEISPKDKARYKYEKRLFNDRTDAEFYQQYPTMYHLRTRLLTDPSKADVREIYFAIHHILKSRGHFLTPGYAKDFNTNKVALNEIFPALQDAYAQVYPDLDITFDENKVNEFKTVLLNEKATPSDTQRALVNLLLAEDGDKDILKQQKQVLTEFAKAVVGLKTKLNVALGTEVDSSEATVWNFSLGQLDDKWAGIESAMTDEGTEILDQIRDLYRARLLNGIVPAGKTLSQAKVDDYAQHHEDLELFKDYLKQLEDDGTAKAIRQLYDRYIDGDDAKPFVREDFVKALTKEVTAHPNAKSPELLERLAQPDFMLKQRNKANGAIPVQMQQRELDQIIKNQSVYYDWLAAPNPVEKHRKSMPYQLDELLNFRIPYYVGPLVTAKEQKAAQGGVFAWMVRKDPDGNITPYNFDEKVDREASANTFIQRMKTTDTYLIGEDVLPKQSLLYQSYEVLNELNNVRVNDNKLSFDQKQQVLGELFERHNTVTIKQFVDNLLAHGDYDRIPEVRGLADEKRFLSSLSTYNQLKGILHEAIDDADKQTDIENIIAWSTIFEDKAIFKTKLNEISWLNAGMINSLANIRYRGWGQFSHKLLNELTLSTGRTVFEELLISSRNLMQILTDEVLKQKIAELNAHELKASGIYAAIDDAYTSPSNKKALRQVLSVIDDITNAAGQAPNWLYIETADGDGVPGKRTNSRQRKIQEIYANAAQELITGSVRGELEDKIASRADFTDRLVLYFMQGGRDIYTGEPLNIDNLSSYDIDHILPQSLIKDNSLDNRVLVHPLVNREKDTIFASTRFAKQMNGMWRQWHAAGLISSRKLRNLQMRPDEIDKYASGFVARQLVETRQIIKLTEQIVADQYPDTKIIAVKAGLSSQLRKELDFPKNREVNHYHHAFDAFLAARIGTYLLKRYPNLEPFFTYGKFKKTEVKKLKSFNFIRDMTHAKDKIVAKETGEIVWDNASDINELDRIYNFKRMLITHEVRFETASLFKQTLYAAKNSKNRGGSRQLIPKKKGYLVDIYGGYTQETGSYLSVVRLTKKAMYAVVKVSTRDAAKLAVAKSISEQKENETLKKIIDGKLSKTSKKGKTTHQLFEIVLPRVGQKTLFKNSKYNQFLVNSDTYMHNYQELWMPREYQRMWKDILLSNHGDAQLEGQLDQIFKFIVSQVNSYFNLYDINQFRKKIADATDKFAKLPTHDTDNARGKIATIGQLLIGLQANAMRSDLRNLDIKTPFGLLQIGTGITLDLDTSIIYQSPTGLFEREVPLTDL

SEQ ID NO: 459 - protein, 700 aa, Lactobacillus casei
MTKLGKPYGIGVDIGSNSIGFAAVDENSHLIRLKGKTVIGARLFEEGKAAADRRASRTTRRRLSRNRWRLSFLRDFFESHITPTDPNFFMRQKYSEISPKDKARYKYEKRLFNDRTDAEFYQQYPTMYHLRTRLLTDPSKADVREIYFAIHHILKSRGHFLTSGYAKDFNTNKVALNEIFPALQDAYAQVYPDLDITFDENKVNEFKTVLLDEKATPSDTQRALVNLLLAEDGDKDILKQQKQVLTEFAKAVVGLKTKLNVALGTEVDSSEATAWNFSLGQLDDKWAGIESAMTDEGTEILDQIRDLYRARLLNGIVPAGKTLSQAKVDDYEQHHEDLELFKDYLKQLEDDGMAKAIRQLYDRYIDGDDAKPFVREDFVKALTKEVTAHPNAKSPELLERLVQPDFMLKQRNKANGAIPVQMQQRELDQIIKNQSVYYDWLAAPNPVEKHRQSMPYQLDELLNFRIPYYVGPLVTAKEQKAAQGGVFAWMVRKDPDGNITPYNFDEKVDREASANTFIQRMKTTDTYLIGEDVLPKQSLLYQSYEVLNELNNVRVNDNKLSFDQKQQVLGELFERHNTVTIKQFVDNLLAHGDYDRIPEVRGLADEKRFLSSLSTYNQLKGILHEAIDDSDKQTDIEKIIAWSTIFEDKAIFKTKLNEISWLNAGMINSLANIRYRGWGQFSHKLLNELTLSTGRTVFEA

SEQ ID NO: 460 - protein, 330 aa, Lactobacillus casei
MTKLGKPYGIGVDIGSNSIGFAAVDENSHLIRLKGKTVIGARLFEEGKAAADRRASRTTRRRLSRNRWRLSFLRDFFESHITPTDPNFFMRQKYSEISPKDKNRYKYEKRLFNDRTDAEFYQQYPTMYHLRNRLLTDPSKADVREIYFAIHHILKSRGHFLTPGDAKDFNTNKVALNEIFPALQDAYAQVYPDLDITFDENKMNEFKTVLLNEKATPSDTQRALVNLLLAEDGDKDILKQQKQVLTEFAKAVVGLKTKLNVALGTEVDSSEATAWNFSLGQLDDKWAGIESAMTDEGTEILDQIRDLYRARLLNGIVPAGKTLSQAKVDD

SEQ ID NO: 461 - protein, 330 aa, Lactobacillus casei
MTKLGKPYGIGVDIGSNSIGFAAVDENSHLIRLKGKTVIGARLFEEGKAAADRRASRTTRRRLSRNRWRLSFLRDFFESHITPTDPNFFMRQKYSEISPKDKNRYKYEKRLFNDRTDAEFYQQYPTMYHLRNRLLTDPSKADVREIYFAIHHILKSRGHFLTPGDAKDFNTNKVALNEIFPALQDAYAQVYPDLDITFDENKMNEFKTVLLNEKATPSDTQRALVNLLLAEDGDKDILKQQKQVLTEFAKAVVGLKTKLNVALGTEVDSSEATAWNFSLGQLDDKWAGIESAMTDEGTEILDQIRDLYRARLLNGIVPAGKTLSHAKVDD

SEQ ID NO: 462 - protein, 1361 aa, Lactobacillus casei
MTKLGKPYGIGVDIGSNSIGFAAVDENSHLIRLKGKTVIGARLFEEGKAAADRRASRTTRRRLSRNRWRLSFLRDFFESHITPTGPNFFMRQKYSEISPKDKARYKYEKRLFNDRTDAEFYQQYPTMYHLRNRLLTDPSKADVREIYFAIHHILKSRGHFLTSGYAKDFNTNKVALNEIFPALQDAYAQVYPDLDITFDENKVNEFKTVLLNEKATPSDTQRALVNLLLAEDGDKDILKQQKQVLTEFAKAVVGLKTKLNVALGTEVDSSEATVWNFSLGQLDDKWAGIESAMTDEGTEILDQIRDLYRARLLNGIVPAGNTLSQAKVDDYAQHHEDLELFKDYLKQLEDDGTAKAIRQLYDRYIDGDDAKPFVREDFVKALTKEVTAHPNAKSPELLERLAQPDFMLKQRNKANGAIPVQMQQRELDQIIKNQSVYYDWLAAPNPVEKHRKSMPYQLDELLNFRIPYYVGPLVTAKEQKAAQGGVFAWMVRKDPDGNITPYNFDEKVDREASANTFIQRMKTTDTYLIGEDVLPKQSLLYQRYEVLNELNNVRVNNEKLSIEQKQQVIRELFERHNSVTIKQFAENLRAHGDYAHIPEIRGLADEKRFLSSLSTYRQLKSLLPDAIDDPAKQADIENIIAWSTVFEDAAIFKTKLKEINWLDSQTITKLSNIRYRGWGQFSHKFLNGLTLGNGHTIIQELFLSNNNLMQILTDETLQKKMTELNADKLKAANINDAIDDAYTSPSNKKALRQVLRVIEDIKRAADGQDPSWLYVETADGGGTPGKRTRARQHQLQEIYANAAHELIDSAVRGELEDKIADKADFNDRLVLYFMQGGRDIYTGTPLNIDQLSSYDIDHILPQSLIKDNSLDNRVLVHAIINREKNATFASTIYAQKMNATWRQWHEAGLISGRKLRNLQMRPDQIDKYASGFVARQLVETRQIIKLTEQIVAAQYPETKIIAVKAGLSHQLREELEFPKNRDVNHYHHAFDAFLAARIGTYLLKRFPNLQAFFTYGKFKKADVKKLRGFNFIRDITHAEDKIVVKDTGEVIWDKKRDVDELDRIYNFKRMLITHEVHFEKADLFKQTVYGAKDSKEAGGKKQLISKKKGYPVDIYGGYTQETGSYLSVVRLTKKAMYAVVKVSTRDAAKLAVAKSISEQKENETLNDIIDEKLSKISKNGKITHELFEVVLPRVGQKTLFKNSKYNLFLVNSDTYMHNYQELWMPREYQKMWKDISLSKYGDAQTEDQLDQIFGFIVSQVNSYFNLYDINQFRKKLNDAADKFATLPMRDTDDMQGKIATIGQLLIGLQANAARSDLRNLDIKTPLGLLQIPNGISLDSDTSVVYQSPTGLLEREVHLSDL

SEQ ID NO: 463 - protein, 1128 aa, Lactobacillus casei
MTKLGKPYGIGVDIGSNSIGFAAVDENSHLIRLKGKTVIGARLFEEGKAAAKRRAGRTTRRRLSRNRWRLSFLRDFFESHITPTDPNFFMRQKYSEISPKDKARYKYEKRLFNDRTDAEFYQQYSTMYHLRNRLMTDPSRADVREIYFAIHHILKSRGHFLTPGDAKDFNTNDVALDEIFPALQDAYAQVYPDLGITFDEDKANEFKTILLNEIATSIDTQRALVKLLLAEEDDKDILKQQKQVLTEFAKAVVGLKTKLNLALGTEVDSSEATAWNFSLGQLDDKWAGIESAMTDEGTEILDQIRDLYRARLLNGIVPTGKTLSQAKVDDYTQHHEDLQLFKAYLKQLEDDGTAKAIRQLYDRYIDGDDAAPFLRENFVKALTKDVTAHPNTKSPELLERLAQPDFMLKQRNKANGAIPVQMQQRELDQIIKNQAVYYDWLAAPNPVEKHRKSMPYQLDELLNFRIPYYVGPLVTAKEQKAAQGGVFAWMVRKDPEGNITPYNFDEKVDREASANTFIQRMKTTDTYLIGEDVLPKQSLLYQRYEVLNELNNVRVNNEKLSIEQKQQVIRELFERHNSVTIKQFAENLRAHGDYAHIPEIRGLADEKRFLSSLSTYRQLKSLLPEAIDDPAKQADIENIIAWSTVFEDAAIFKTKLKEISWLGSEAITKLSNIRYRGWGQFSRKFLNGLTLGNGHTIIQELLLSTNNLMQILTDETLQKKMTELNADKLKTANINDAIDNAYTSPSNKKALRQVLRVVDDIKRAADGQDPSWLYVETADGGGTPGKRTRARQHQLQEIYANAAHELIDTAVRGELEDKISDKADFNDRLVLYFMQGGRDIYTGAPLNIDQLSSYDIDHILPQSLIKDNSLDNRVLVHAIINREKNATFASTIYAQKMNATWRQWHEAGLISGRKLRNLQMRPDQIDKYASGFVARQLVETRQIIKLTEQIVAAQYPDTKIIAVKAGLSHQLREELEFPKNRDVNHYHHAFDAFLAARIGTYLLKRFPNLQAFFTYGKFTKADVKKLRGFNFIRDITHAEDKIVAKDTGEVVWDKQRDVDELDRIYNFKRMLITHEVRFETADLFKQTVYGARDSKEAGGSKQLIPKKKDIQLIFMGAISERTRPILPL

SEQ ID NO: 464 - protein, 1366 aa, Lactobacillus casei
MTKLGKPYGIGVDIGSNSIGFAAVDENSHLIRLKGKTVIGARLFEEGKAAAYRRASRTTRRRLSRNRWRLSFLRDFFESHITPTDPNFFMRQKYSEISPKDKARYKYEKRLFNDRTDAEFYQQYPTMYHLRTRLLTDPSKADVREIYFAIHHILKSRGHFLTPGYAKDFNTNKVALNEIFPALQDAYAQVYPDLDITFDENKVNEFKTVLLNEKATPSDTQRALVNLLLAKEGDRDILKQQKQVLTEFAKAVVGLKTKLNVALGTEVDSSEATAWNFSLGQLDDKWAGIESAMTDEGTEILDQIRDLYRARLLNGIVPAGKTLSQAKVDDYAQHHEDLELFKDYLKQLEDDGTAKAIRQLYDRYIDGDDAKPFVREDFVKALTKEVTAHPNAKSPELLERLAQPDFMLKQRNKANGAIPVQMQQRELDQIIKNQAVYYDWLAAPNPVEKHRQSMTYQLDELLNFRIPYYVGPLVTAKEQKAAQGGVFAWMVRKDPDGNITPYNFDEKVDREASANTFIQRMKTTDTYLIGEDVLPKQSLLYQSYEVLNELNNVRVNDNKLSFDQKQQVLGELFERHNTVTIKQFVDNLLAHGDYDRIPEVRGLADEKRFLSSLSTYNQLKGILHEAIDDADKQTDIENIIAWSTIFEDKAIFKTKLNEISWLNAGMINSLANIRYRGWGQFSHKLLNELTLSTGRTVFEELLISSRNLMQILTDEVLKQKIAELNAHELKASGIYAAIDDAYTSPSNKKALRQVLSVIDDITNAAGQAPNWLYIETADGDGVPGKRTNSRQRKIQEIYANAAQELITGSVRGEFEDKIASRADFTDRLVLYFMQGGRDIYTGEPLNIDNLSSYDIDHILPQSLIKDNSLDNRVLVHPLVNREKDTIFASTRFAKQMNGMWRQWHAAGLISSRKLRNLQMRPDEIDKYASGFVARQLVETRQIIKLTEQIVADQYPDTKIIAVKAGLSSQLRKELDFPKNREVNHYHHAFDAFLAARIGTYLLKRYPNLEPFFTYGKFKKTEVKKLKSLKSLKSFNFIRDMTHAKDKIVAKETGEIVWDNASDINELDRIYNFKRMLITHEVRFETASLFKQTLYAAKNSKNRGGSRQLIPKKKGYLVDIYGGYTQETGSYLSVVRLTKKAMYAVVKVSTRDAAKLAVAKSISEQKENETLKKIIDGKLSKTSKKGKTTHQLFEIVLPRVGQKTLFKNSKYNQFLVNSDTYMHNYQELWMPREYQRMWKDILLSNHGDAQIEGQLDQIFKFIVSQVNSYFNLYDINQFRKKIADATDKFAKLPTHDTDNARGKIATIGQLLIGLQANAMRSDLRNLDIKTPFGLLQIGTGITLDLDTSIIYQSPTGLFEREVPLTDL

SEQ ID NO: 465 - protein, 1354 aa, Lactobacillus coryniformis
MTLHYNVGLDIGTNSVGYTIVDDNGKILQVKGKNGYGVRVFKEGATAAERRIFRTTHRRLKRRKWRLRLLQDFFEPYILPQDDGFFIRRKESNLVLNDRDEDTASLFNDRSDRDFYQAYPTIYHLRQALMTEKRQFDVREIYLAMHHIIKYRGHFLLNGTVNNFTNNKIDLHSDFEELNALLLNVIPELKFQIDLDHSTMFQTTLLNTTISRSGRQRDLVKSFYNGSDDKQLAKQQKSVATELLKAILGLKAKFHKLFNLDLLETTEWEFSFDAEDIDDKLAKLEPLMTENQQQVMDILQRIFAAITLNGIVPEGKTLSASKVDSYQKHKQDLKLLKAIAQHSDKKTATVLQTAYNEYINGIASKPLKQEDFYKRLTNAVKKSSDPQVADMLALIDQEKFLPKQRTKENGAIPHQLHQLELERIIDNQKDYYPWLAELNPNQARQKVAKYKLSELVAFRVPYYVGPLIEPEVQQATSNAHFAWMARKEAGPITPWNFDQKVDRNVSAERFIKRMTTKDTYLLAEDVLPLHSLLYQRFIVLNELNNVRVNGQKLTKKQKQAVYQDLFKRQPHVTKKQFKSYLVQTGEFAESSKIEGLANETSFNSGLTTENELRKIFGAQLDEARYQVDFEQIIEWATLFEDAKILRTKLAEITWLTTEQIEKLAGIRYRGWGRFSRKLLAGLRDQNGQQIIDLLWDTPNNFMVIVSQAAFSEAITKENEKLIDRRGAQDVITDLYTSPQNKKALRQVLAIVADVQKAMGGVPPQRIFIEFAREDEKNPRRSVERSRQLEKLYQTISNEFLINSEVRQELKEAVDQKVNFKDRLFLYFLQGGVDLYSGKRINIDQLSHYDIDHILPQSFIKDDSLDNRVLVSQKLNRSKSDSVPLSEFANYKFGPAMQAKWLQLKEAGLLSKRKYDNLTLDPTKLSKFAPLGFVNRQLVETRQVIKLAANLLASEETKVVTIKANMTHQVRKELDFPKNRNVNNYHHAFDAYLTAFVGIFLSKRYPKLKPYFTYGDFQKGNKLPDLKNFNFLYELKNKDRSIDSNTGEIIWDKQRDLAYMNKIYNFKKVTVVHEVLTKSGALYNQTLYKASEDKASGRGTKQLIRKKDNMPTELYGGYTGSTSAFMSIVRLWKKDKPYYKVVGIPTRMAAKLANQAQLLDYLTKKFTTRKLVKKTGDYKTTVERFELVVPKVGFNQLVIDGGQPFMLGSATYQYNARELFISKEAVKALNKQLSTHVDLVQVFDEILVQVNRWFPLYDTNGFREKLSHGRDRFMKLNDSFEEKSDTQIDVLNRILIGFHANAARTNLKILGLGTDLGFMTQQAGIRLTEKAILVHQSPSGLFERKVALRDLKGLR

SEQ ID NO: 466 - protein, 544 aa, Lactobacillus crispatus
KYYLYFMQLGRDAYTGKPINIDEVSQYYDIDHILPQSFIKDDSLNNRVLVAKPINNGKSDGVPLKLFGDNLATGLGITVKQMWNNWADKGLINKAKQNNLFLDPENINKHQASGFIRKQLVETSQIIKLATTILQAEYPKTKIIVVKASSNHYLRNEFDLYKSREVNDYHHAIDAYLTTICGNLLYQAYPKLRPFFVYGQFKKFSSDPKKENEILKKTKNFDFVAKLLGSKAPNEIRSQQGKVLFEKNKIRLQLNKAYNYKYMLVSRDTTTKNQEMFGMTIYPRAERDIAKSRKLIEKRKGFSTDIYGGYTGTAAAYMAIVRINKTKSSQYKVIAVPMTKRAILNKAEKEGNYEKILKQILSPSILYNDKGKRKAGVISFDIIKGKVPYNQVVQDGNKKFLLKSAIYLCNAKQLVLSEEAMRVITGHWLDSDKQDQELLDVYDEILEKIDRYLPLFDIRDFRNKLHKGREKFLKLNAEDKFKAIIQILKGLHDNSDTGELKDIGITVPFGQLQNNSGITLSSDTILVYQSPTGLFEKRVKISSL

SEQ ID NO: 467 - protein, 298 aa, Lactobacillus crispatus
MDELNKISVNGKKLSVSVKQELYEDLFKKNNTVSAKQLKNWLIENQKLPYIKIKGLADQTKFNSSLSTYIKLKKSGLFVDKLDSNEFRDDFEKIIEWSTIFEDKQIYIQKLQTIDWLTAKQIQFLQNIRLQGWGRLSKKLLTAIVDSNGQNIIEQLWNSQQIFMSIVNKADIKGTITDANQDLMHSNSMEDILSEAYTSPANKKMIRQVVKVVHDIQKAASGQAPKQIAIEFARESRRNSKLSQTRGHKLQDIYQKISGDIVNKNLKDKLAEYIKNNQLSVWEKTSFQMNKNDQDFLF

SEQ ID NO: 468 - protein, 279 aa, Lactobacillus crispatus
MNGKKLSVSVKQELYEDLFKKNNTVSAKQLKNWLIENQKLPYIKIKGLADQTKFNSSLSTYIKLKKSGLFVDKLDSNEFRDDFEKIIEWSTIFEDKQIYIQKLQTIDWLTAKQIQFLQNIRLQGWGRLSKKLLTAIVDSNGQNIIEQLWNSQQIFMSIVNKADIKGTITDANQDLMHSNSMEDILSEAYTSPANKKMIRQVVKVVHDIQKAASGQAPKQIAIEFARESRRNSKLSQTRGHKLQDIYQKISGDIVNKNLKDKLAEYIKNNQLNKDKYYTR

SEQ ID NO: 469 - protein, 538 aa, Lactobacillus crispatus
MQLGRDAYTGKPINIDEVSQYYDIDHILPQSFIKDDSLNNRVLVAKPINNGKSDGVPLKLFGDNLATGLGITVKQMWNNWADKGLINKAKQNNLFLDPENINKHQASGFIRKQLVETSQIIKLATTILQAEYPKTKIIVVKASSNHYLRNEFDLYKSREVNDYHHAIDAYLTTICGNLLYQAYPKLRPFFVYGQFKKFSSDPKKENEILKKTKNFDFVAKLLGSKAPNEIRSQQGKVLFEKNKIRLQLNKAYNYKYMLVSRDTTTKNQEMFGMTIYPRAERDIAKSRKLIEKRKGFSTDIYGGYTGTAAAYMAIVRINKTKSSQYKVIAVPMTKRAILNKAEKEGNYEKILKQILSPSILYNDKGKRKAGVISFDIIKGKVPYNQVVQDGNKKFLLKSAIYLCNAKQLVLSEEAMRVITGHWLDSDKQDQELLDVYDEILEKIDRYLPLFDIRDFRNKLHKGREKFLKLNAEDKFKAIIQILKGLHDNSDTGELKDIGITVPFGQLQNNSGITLSSDTILVYQSPTGLFEKRVKISSL

SEQ ID NO: 470 - protein, 206 aa, Lactobacillus crispatus
MQLGRDAYTGKPINIDEVSQYYDIDHILPQSFIKDDSLNNRVLVAKPINNGKSDGVPLKLFGDNLATGLGITVKQMWNNWADKGLINKAKQNNLFLDPENINKHQASGFIRKQLVETSQIIKLATTILQAEYPKTKIIVVKASSNHYLRNEFDLYKSREVNDYHHAIDAYLTTICGNLLYQAYPKLRPFFVYGQFKKFSSDPKKRK

SEQ ID NO: 471 - protein, 857 aa, Lactobacillus crispatus
MTKLNNEYMVGLDIGTNSCGWVATDFDNNILKMHGKRALGSHLFDEGVSAADRRAFRTTRRRIKRRKWRLKLLEEIFDEEMAKVDPNFFARLKESGLSPLDTRKNVSSIVFPTKKMDKQFYKKFPTIYHLRNALMKQDKKFDLRAIYIAIHHIVKYRGNFLSNSSISNFSASKIEIDRFVNELNDLYSIFLPESGVIFDAGNASKVEDIIRNEQMFKLDKIKEIADVLPDTENKSGLKLSKKISKEISKAILGYKAKFEIILQVNVDKTDSSIWNFKLNDENADVNLSEITSDLTDTQLQILDLVRNLFSAISLLNIVDEGSTLSESMIRKYNDHAQDLKLLKTVIKNHSDRKKAHNLQLAYDKYVNNRHFVDVETKKAFPNKHLYRKSDFYEIVKKNLDASKEAVQIRKEIALDKFMPKQRSDENGVIPFQLNQIELDKIIENQGKYYPFLKEINPIKAHRMQAPYKLDELIRFRVPYYVGPMIEPTNSSYPQTRQNQSFAWMVRKAKGRITPWNFDEKVDRQKSANNFIKRLTTKDTYLFGEDVLPANSLLYQKYTVLDELNKISVNGKKLSVSVKQELYEDLFKKNNTVSAKQLKNWLIENQKLPYIKIKGLADQTKFNSSLSTYIKLKKSGLFVDKLDSNEFRDDFEKIIEWSTIFEDKQIYIQKLQTIDWLTAKQIQFLQNIRLQGWGRLSKKLLTAIVDSNGQNIIEQLWNSQQIFMSIVNKADIKGTITDANQDLMHSNSMEDILSEAYTSPANKKMIRQVVKVVHDIQKAASGQAPKQIAIEFARESRRNSKLSQTRGHKLQDIYQKISGDIVNKNLKDKLAEYIKNNQLSVWEKTSFQMNKNDQDFLF

SEQ ID NO: 472 - protein, 857 aa, Lactobacillus crispatus
MTKLNNEYMVGLDIGTNSCGWVATDFDNNILKMHGKRALGSHLFDEGVSAADRRAFRTTRRRIKRRKWRLKLLEEIFDEEMAKVDPNFFARLKESGLSPLDTRKNVSSIVFPTKKMDKQFYKKFPTIYHLRNALMKQDKKFDLRAIYIAIHHIVKYRGNFLSNSSISNFSASKIEIDRFVNELNDLYSIFLPESGVIFDAGNASKVEDIIRNEQMFKLDKIKEIADVLPDTENKSGLKLSKKISKEISKAILGYKAKFEIILQVNVDKTDSSIWNFKLNDENADVNLSEITSDLTDTQLQILDLVRNLFSAISLLNIVDEGSTLSESMIRKYNDHAQDLKLLKTVIKNHSDRKKAHNLQLAYDKYVNNRHFVDVETKKAFPNKHLYRKSDFYEIVKKNLDASKEAVQIRKEIALDKFMPKQRSDENGVIPFQLNQIELDKIIENQGKYYPFLKEINPIKAHRMQAPYKLDELIRFRVPYYVGPMIEPTNSSYPQTRQNQSFAWMVRKAKGRITPWNFDEKVDRQKSANNFIKRLTTKDTYLFGEDVLPANSLLYQKYTVLDELNKISVNGKKLSVSVKQELYEDLFKKNNTVSAKQLKNWLIENQKLPYIKIKGLADQTKFNSSLSTYIKLKKSGLFVDKLDSNEFRDDFEKIIEWSTIFEDKQIYIQKLQTIDWLTAKQIQFLQNIRLQGWGRLSKKLLTAIVDSNGQNIIEQLWNSQQIFMSIVNKADIKGTITDANQDLMHSNSMEDILSEAYTSPANKKMIRQVVKVVHDIQKAASGQAPKQIAIEFARESRRNSKLSQTRGHKLQDIYQKISGDIVNKNLKDKLAEYIKNNQLSVWEKNSFQMNKNDQDFLF

SEQ ID NO: 473 - protein, 347 aa, Lactobacillus crispatus
MVNLKSLVLILKKENEILKKTKNFDFVAKLLGSKAPNEIRSQQGKVLFEKNKIRLQLNKAYNYKYMLVSRDTTTKNQEMFGMTIYPRAERDIAKSRKLIEKRKGFSTDIYGGYTGTAAAYMAIVRINKTKSSQYKVIAVPMTKRAILNKAEKEGNYEKILKQILSPSILYNDKGKRKAGVISFDIIKGKVPYNQVVQDGNKKFLLKSAIYLCNAKQLVLSEEAMRVITGHWLDSDKQDQELLDVYDEILEKIDRYLPLFDIRDFRNKLHKGREKFLKLNAEDKFKAIIQILKGLHDNSDTGELKDIGITVPFGQLQNNSGITLSSDTILVYQSPTGLFEKRVKISSL

SEQ ID NO: 474 - protein, 534 aa, Lactobacillus crispatus
RDAYTDKPINIDEVSQYYDIDHILPQSFIKDDSLNNRVLVAKPINNGKSDGVPLKLFGDNLATGLGITVKQMWNNWADKGLINKAKQNNLFLDPENINKHQASGFIRKQLVETSQIIKLATTILQAEYPKTKIIVVKASSNHYLRNEFDLYKSREVNDYHHAIDAYLTTICGNLLYQAYPKLRPFFVYGQFKKFSSDPKKENEILKKTKNFDFVAKLLGSKAPNEIRSQQGKVLFEKNKIRLQLNKAYNYKYMLVSRDTTTKNQEMFGMTIYPRAERDIAKSRKLIEKRKGFSTDIYGGYTGTAAAYMAIVRINKTKSSQYKVIAVPMTKRAILNKAEKEGNYEKILKQILSPSILYNDKGKRKAGVISFDIIKGKVPYNQVVQDGNKKFLLKSAIYLCNAKQLVLSEEAMRVITGHWLDSDKQDQELLDVYDEILEKIDRYLPLFDIRDFRNKLHKGREKFLKLNAEDKFKAIIQILKGLHDNSDTGELKDIGITVPFGQLQNNSGITLSSDTILVYQSPTGLFEKRVKISSL

SEQ ID NO: 475 - protein, 278 aa, Lactobacillus crispatus
SVNGKKLSVSVKQELYEDLFKKNNTVSAKQLKNWLIENQKLPYIKIKGLADQTKFNSSLSTYIKLKKSGLFVDKLDSNEFRDDFEKIIEWSTIFEDKQIYIQKLQTIDWLTAKQIQFLQNIRLQGWGRLSKKLLTAIVDSNGQNIIEQLWNSQQIFMSIVNKADIKGTITDANQDLMHSNSMEDILSEAYTSPANKKMIRQVVKVVHDIQKAASGQAPKQIAIEFARESRRNSKLSQTRGHKLQDIYQKISGDIVNKNLKDKLAEYIKNNQLNKDKYY

SEQ ID NO: 476 - protein, 277 aa, Lactobacillus crispatus
SVNGKKLSVSVKQELYEDLFKKNNTVSAKQLKNWLIENQKLPYIKIKGLADQTKFNSSLSTYIKLKKSGLFVDKLDSNEFRDDFEKIIEWSTIFEDKQIYIQKLQTIDWLTAKQIQFLQNIRLQGWGRLSKKLLTAIVDSNGQNIIEQLWNSQQIFMSIVNKADIKGTITDANQDLMHSNSMEDILSEAYTSPANKKMIRQVVKVVHDIQKAASGQAPKQIAIEFARESRRNSKLSQTRGHKLQDIYQKISGDIVNKNLKDKLAEYIKNNQLNKDKY

SEQ ID NO: 477 - protein, 1368 aa, Lactobacillus curvatus
MSRPYNIGLDIGTSSIGWSVVDDQSKLVSVRGKYGYGVRLYDEGQTAAERRSFRTTRRRLKRRKWRLGLLREIFEPYITPIDDTFFLRQKQSNLSPKDQRKLYTQTSLFNDRTDRAFYDDYPTIYHLRYRLMTEKRQFDIREIYLAMHHIVKYRGHFLNEAPVSSFKSSEINLVAHFDRLNTIFADLFSESGFQLETDKLAEVKALLLDNQQSASNRQRQALSLIYTPSTNKAVEKQNKAIATELLKAILGLKAKFNVLTGIEAEDVKAWTLTFNAENFDEEMVKLESSLDDNAHQIIESLQELYSGVLLAGIVPENQSLSQAMITKYDDHQKHLKMLKAVREALAPGDRQRLKQAYDQYVDGQENTKAYSKEDFYGDITKALKNNPDHPIVSEIKKLIELDQFMPKQRTKDNGAIPHQLHQQELDRIIENQQQYYPWLAELNPNSKRQTVAKYKLDELVAFRVPYYVGPLITAEQQRQSSDAKFAWLIRKAEGRITPWNFDDKVDRQASANEFIKRMTTTDTYLLAEDVLPKQSLIYQRFEVLNELNGLKIDDQPITTELKQAIFTDLFMQKISVTVKNIQDYLVSEKRYASRPAITGLSDENKFNSRLSTYHDLKMIVGDAVDDVDKQADLEKCIEWSTIFEDGKIYSAKLNEIDWLTDQQRVQLAAKRYRGWGRLSAKLLTQIVNANGQRIMDLLWDTTDNFMRIVHSEDFDKLITEANQMMLAENDVQDVINDLYTSPQNKKALRQILLVVNDIQKAMKGQAPERILIEFAREDEVNSRLSVQRKRQVEQVYQNISNELLNNTEIRNELKDLSNSALSNTRLFLYFMQGGRDMYTGDSLNIDRLSTYDIDHILPQSFIKDNSLDNRVLVSQKMNRSKADQVPTDFTSVELGQKMQIQWEQMLRAGLITKKKYDNLTLNPDHISKYAMKGFINRQLVETRQVIKLATNLLMEQYGEDNIELITVKSGLTHQMRTEFDFPKNRNLNNHHHAFDAYLTAFVGLYLLKRYPKLKPYFVYGEYQKASQQDKWRNFNFLNGLKKDELVDENTEAVIWDKESGLAYLNKIYQFKKILVTRGVHENSGALFNQTLYAAKDDKASGQGGKQLIPAKQDRSTALYGGYSGKTVAYMCIVRIKNKKGDLYKVCGVETSWLAQLKQLTDEDSQKAFLEQKISPQFTKVKKQKGNIIEAVEEFEVIAPHILINQRFFDNGQELTLGSATYKHNEQELILDKTAVKLLNGALPLTQSEELAEQVYDEILDQVMHYFPLYDTNQFRAKLSTGKAAFMKLPWKSQWDGNKMVQVGQQVILDRILIGLHANAAMSDLKVLKMTTPFGMIQQSTGITLSADTQIIYQSPTGLFERRVALRDL

SEQ ID NO: 478 - protein, 669 aa, Lactobacillus delbrueckii
MAKPKDYTIGLDIGTNSVGWVVTDDQNNILRIKGKKAIGARLFTEGKVAAERRSFRTTRRRLSRRRWRIKMLEELFDEEIAKVDPSFFARLHESWISPKDKRKRYSAIVFPSPEEDKKFHESYPTIYHLRDKLMKDDQKHDIREIYIAVHQMIKARGNFLHDESVETYRSGMSSLGGRSERNILSVQTLEELNDLFAENEGTEEVELNVASAEQINDILTGGHLNADSQKEISNLLLPSSFPSFDDKAKEKQVKKLINNVATNISKAWLGYKADFSTILNLAKVDKDQKKIFAFALQGGDEEDKVQELESLLEQSQTDIVDRLIEIRHAIVLSEIVPVGMTLSEAMIDKYDQHKEDLITLKAVIRNTKDKKKAAKLQAIYDLYVKKRHADLAKAMKLTGIKKRSELLDPEELKKGISSLLDDSPEAVEIKQRLEEKTFLPLQRSNNNGVIPNQLHQVELDEIIKKQSKYYPFLAEKNPDESEEAQKKAPTKLDALLTFRVPYYVGPMITKEEQEAQNGHSFAWMVRRDPQDHEAITPWNFEKKVDKMASATQFIKRMTTKDTYLLGEDVLPASSLKYQLFTVLNELNNLRVNGKKLTSDEKEQVIEGLFKKQKTVKADKFVKYWQAKHIGADIKVKGLSDPSKFNSTMSTYIDFKKIFGDQLNDVNRQR

SEQ ID NO: 479 - protein, 544 aa, Lactobacillus delbrueckii
MTGCADYDVDHIMPQSFVKDDSLDNRVLVARAVNNQKSDKVPALLFGNKVVADLGITVREMWDKWQKLGMISKRKLSNLLTDPDALTEYRAQGFIRRQLVETSQVIKLTATILQSEFPDSKIIEVPAKYNSIVRKQFDLYKSREVNDFHHAIDAYLSTIVGNYLYQVYPNLRRMFVYGEFKKFSSNAEESAHDVARRVKSMNFLDDLLRGTHGDNIYCRSTGEIVFNRNDIISKLKQAYSFKQMLVTQEVFTKKSALFDQTVYPSPERDSKKRSGLIPRKKGMDTEIYGGYSGNKDAYFVLAEAVKEKGHTLQIVGVPIRALNTLKNSANYSEKLLEIIKPQVMFNKDTGKPIKGIKDVKILMDKIPCRQPVLEGESYYMLASSKYRYSLKQISLSQMSMKYILDYIDDPNFNKHEMINIDQQDEKECLLSVYDEILEKMDKYLPLFDIRSFRKKLHDGRDAFIALPVASEEKKPGEVDVIRKILKGLHANADITNLAELGFGTAALGALVSTGGIKISDDAVFIYQSPTGLFERRVKVSDLLK

SEQ ID NO: 480 - protein, 1356 aa, Lactobacillus farciminis
MTKKEQPYNIGLDIGTSSVGWAVTNDNYDLLNIKKKNLWGVRLFEEAQTAKETRLNRSTRRRYRRRKNRINWLNEIFSEELAKTDPSFLIRLQNSWVSKKDPDRKRDKYNLFIDGPYTDKEYYREFPTIFHLRKELILNKDKADIRLIYLALHNILKYRGNFTYEHQKFNISNLNNNLSKELIELNQQLIKYDISFPDDCDWNHISDILIGRGNATQKSSNILKDFTLDKETKKLLKEVINLILGNVAHLNTIFKTSLTKDEEKLNFSGKDIESKLDDLDSILDDDQFTVLDAANRIYSTITLNEILNGESYFSMAKVNQYENHAIDLCKLRDMWHTTKNEEAVEQSRQAYDDYINKPKYGTKELYTSLKKFLKVALPTNLAKEAEEKISKGTYLVKPRNSENGVVPYQLNKIEMEKIIDNQSQYYPFLKENKEKLLSILSFRIPYYVGPLQSAEKNPFAWMERKSNGHARPWNFDEIVDREKSSNKFIRRMTVTDSYLVGEPVLPKNSLIYQRYEVLNELNNIRITENLKTNPIGSRLTVETKQRIYNELFKKYKKVTVKKLTKWLIAQGYYKNPILIGLSQKDEFNSTLTTYLDMKKIFGSSFMEDNKNYDQIEELIEWLTIFEDKQILNEKLHSSKYSYTPDQIKKISNMRYKGWGRLSKKILMDITTETNTPQLLQLSNYSILDLMWATNNNFISIMSNDKYDFKNYIENHNLNKNEDQNISDLVNDIHVSPALKRGITQSIKIVQEIVKFMGHAPKHIFIEVTRETKKSEITTSREKRIKRLQSKLLNKANDFKPQLREYLVPNKKIQEELKKHKNDLSSERIMLYFLQNGKSLYSEESLNINKLSDYQVDHILPRTYIPDDSLENKALVLAKENQRKADDLLLNSNVIDRNLERWTYMLNNNMIGLKKFKNLTRRVITDKDKLGFIHRQLVQTSQMVKGVANILDNMYKNQGTTCIQARANLSTAFRKALSGQDDTYHFKHPELVKNRNVNDFHHAQDAYLASFLGTYRLRRFPTNEMLLMNGEYNKFYGQVKELYSKKKKLPDSRKNGFIISPLVNGTTQYDRNTGEIIWNVGFRDKILKIFNYHQCNVTRKTEIKTGQFYDQTIYSPKNPKYKKLIAQKKDMDPNIYGGFSGDNKSSITIVKIDNNKIKPVAIPIRLINDLKDKKTLQNWLEENVKHKKSIQIIKNNVPIGQIIYSKKVGLLSLNSDREVANRQQLILPPEHSALLRLLQIPDEDLDQILAFYDKNILVEILQELITKMKKFYPFYKGEREFLIANIENFNQATTSEKVNSLEELITLLHANSTSAHLIFNNIEKKAFGRKTHGLTLNNTDFIYQSVTGLYETRIHIE

SEQ ID NO: 481 - protein, 1313 aa, Lactobacillus fermentum
MHYLDEIFAPHLQEVDENFLRRLKQSNIHPEDPAKNQAFIGKLLFPDLLKKNERGYPTLIKMRDELPVEQRAHYPVTNIYKLREAMINEDRQFDLREVYLAVHHIMKYRGHFLNNASVDKFKVGRIDFYKSFNVLNEAYEELQNGEGSFTIEPSKVEKIGQLLLDTKMRKLNRQKAVAKLLEVKVADKEETKRNKQIATAMSKLVLGYKADFATVAMANGNEWKIDLSSETSEDEIEKFREELSDAQNDILTEITSLFSQIMLNEIVPNGMSISESMMDRYWTHERQLAEVKEYLATQPASARKEFDQVYNKYIGQAPKERGFDLEKGLKKILSKKENWKEIDELLKAGDFLPKQRTSANGVIPHQMHQQELDRIIEKQAKYYPWLATENPATGERDRHQAKYELDQLVSFRIPYYVGPLVTPEVQKATSGAKFAWAKRKEDGEITPWNLWDKIDRAESAEAFIKRMTVKDTYLLNEDVLPANSLLYQKYNVLNELNNVRVNGRRLSVGIKQDIYTELFKKKKTVKVSDVASLVMAKTRGVNKPSVEGLSDPKKFNSNLATYLDLKSIVGDKVDDNRYQTDLENIIEWRSVFEDGEIFADKLTEVEWLTDQQRSALVKKRYKGWGRLSKKLLTGIVDENGQRIIDLMWNTDQNFMQIVNQPVFKEQIDQLNQKAITNDGMTLREWVESVLDGAYTSPQNKKAIWQVVRVVEDIVKAVGNAPKSISIEFARNEGNKGEITRSRRTQLQKLFEDQAHELVKDTSLTEELEKAPDLSDRYYLYFTQGGKDMYTGDPINFDEISTKYDIDHILPQSFVKDDSLDNRVLVSRAENNKKSDRVPAKLYAAKMKPYWNQLLKQGLITQRKFENLTMDVDQNIKYRSLGFVKRQLVETRQVIKLTANILGSMYQEAGTDIIETRAGLTKQLREEFDLPKVREVNDYHHAVDAYLTTFAGQYLNRRYPKLRSFFVYGEYMKFKHGSDLKLRNFNFFHELMEGDKSQGKVVDQQTGELITTRDEVAKSFDRLLNMKYMLVSKEVHDRSDQLYGATIVTAKESGKLTSPIEIKKKRPVDLYGAYTNGTSAFMTIIKFTGNKPKYKVIGVPTTSAVGLKRVGKPGSESYNQELHRIIKSNPKVKKDFEIVVPHVSYSQLIVDDDCKFTLASDTYQHPATQLVLSKESMEIIADDFKFVKENTATADEQLVRVFDEIVNQMNHYFTIFDQRSNRQKVTKARDKFVSLPTESEYEGAKKTQVGKTEVITNLLMGLHANSAQGDLKVLGLSTFGFFQSSGGLNLSEDAMIVYQSPTGLFERRICLKDI

SEQ ID NO: 482 - protein, 1327 aa, Lactobacillus florum
MTEQQQPYNIGLDIGTSSIGWAVTDQNDKLLHIRGHNGIGVRLFKEGESAAERRGFRTTRRRLSRRRWRLRFLDRIFDAELAKVDPNFLARLKQSNISPLDPNKQMFGNILFDDPQFDDQKFHQQYPTIYHLRSALAQPDAPQADVRLIYLALHHMIKFRGHFLNGAAVEKFHGGQLHLESEFQELNQIFSNQQRDHVQLQTSSLDEVATILKDNQRTPSDRQRELSARLFVPVDKTIDKENKKLATELLKAVLGLKAKFDVILGVEATDPQAFKLQFSSDDFDDKIAELASELTDEANEILTVLQRLYFSLNLADILTNRQTKQVADSISTAMINRYDDHKHHLKMLKELEAQVTQEQRDGLKKAYDEYIDGDKPTIDTFYTNIKKNLDDSELANQIKSLIDLQAFMPKQRSKENGSIPHQLHQRELDQLIEVQGKYYPWLLAAKDKLDALIAFRVPYYVGPMIDPNQSDDPQNTKFAWMVRKEAGEITPWNFEEKVDKTSSATNFIKRMTTTDTYLLGEPVLPKNSLLYQQFTVLNELNKLKVNGKALTVDQKKYLYEHVCKKQRRVTLKKLSDCLMARGDFPMGAIFTGTTDQKNMNNTLKTYQDFQEIFGDEIDNPDRQVDFEKMIEWSAIFEDREIFKLKLAELNWLTSEQLERVSKKRYQGWGRLSQKLLTHIVNENGERIIDQLWNTNQNFMEIMGQDSVKQAIQEHNGANVAQTGINETIDELYTSPQNKKAIRQILLVVDDIKKAVGYAPANIMMEFAREDRDDHRLIASRARQLEKTYQEISKNWFDNESVTQELKDQIKNKTKFTDRLYLYFIQGGIDLYTGHPLNIDQLSSYDIDHILPQSFLLDNSLNNRVLTSQAENRVHKEDRLPGETVANKMRPTWKMMREQGLMTQRKYNNLTLKPDQISKFNNRGQFINRQLVETRQVIKLAADIMSQKYQADQTKVVTVKANLTHHMREKFNFYKSRNVNDYHHAFDAYLTLFVGNWLLKEYPKLQPYFVYGDFAKTGTNNLKSFNFLYRFERDHKLNDKGAIDTDKDQQLGYMKRIYRFKKMLVTKQLETNEGALYGQTLYPAPKNDKKTRNLINSKKNRPSDIYGGYSNENGSFLTLVKLKKGSKYDYRLVAVPVSKISEIKESELATIEKAIAPQFLKSSGKYRDFQVVLSKILINQKVIDDGMIFTIGSKSYKHNAKQVVLSDNSIQIVSTLSRISDKEKLITVFDEIVDITSKYLPWYKVNDVEKTKMLFRQMQDIDEMKKIIDNSLIGLHCNASITDLGKVGLSKYWGRFVLTAGISLTVDAQLIYQSPTGLFEHRVKVSDL

SEQ ID NO: 483 - protein, 1386 aa, Lactobacillus hominis
MTKITEDYIVGLDIGTNSCGWVAMDSKNTILRMHGKTAIGSHLFDAGNSAADRRAFRTTRRRIKRRKWRLKLLEEIFDSHLAKVDPYFFARLKESGLSPLDTRKNVSSIIYPTSLEDKKFYVDNPTIYHLRYKLMTEDRKFDLREVYLAIHHIVKYRGNFLYNTPVKAFEASKIDVKGSLKKLNELYEGLDSEFNVELDSNNALEIENIIRDKKIFKINKVKEINQLLSLKTEDKERTKLMKDVSKQIVNAILGYKTKFETILLKDVSKDEADDWEFKLTDVDADNKFENLIGDLNENEQEILLVIRKLANAITLSNIVEEGKTLSESMKDKYKKHSDDLKLLKQVISDHPDRDKAKKLALAYDLYVNNRHGKILQAKDILEKKKTLSKEDFYKEIKKNLDDSKESQEILDAISLDSFMPKQRTNENGVIPYQLHQLELDKIIENQGKYYPFLKEVNPVSSHLKQAPYKLDELIRFRVPYYVGPLISPNESTKNKQTKKNQNFAWMIRKEQGQITPWNFDQKVDRMASANKFIKRMTTIDTYLLGEDVLPANSLLYQKFTVLNELNNVKINGKRISVPLKQELYNNLFKKNSTVTTNKLKSYLKENYKLIKVEIKGLSDEKKFNSGLTTYNKLKNLKIFDQQIDDPNYNKDFERIIEWSTIFEDKAIYKEKLKTIDWLSDRQIDKLSKIRMQGWGQLSKKLLSQLTDNNGQTIIEQLWDSQNNFMQIVNQADFKDAIAVANQNLLVDTSVEDILNEAYTSPANKKAIRQVVKVVDDIVKATSGKVPKQIAIEFTRDADDNAKISQSRANKLRKVYKEMSNELASETIRNELERVAKDQKLLKDKHYLYFMQLGRDAYTGELIDIDNLEQYDIDHVLPQSFIKDDSLENRVLVKKAVNNGKSDNVPVKLYGNRMATDLGMTIRHMWEKWKEQGLITKTKYNNLIIDPDKINKYESSGFIHRQLVETSQIIKLVSTILQSKYPDTEIIVVKARYNHYLRKRLNLYKSREVNDYHHAIDAYLSAICGNLLYQVYPYLRPFFVYGQYKKFSSEPEKEKIIYDKTRRYNFISQIFENKDNDIISRETKKKVFDKKDIIEKLKRAYNYKYMLVSRETETHDQEMFKMTVYPRLSRDTKKSRNLIPKKKDMPTEIYGGYTNNSDAYMIIARINKKKGPEYRVFGVPMRELVNLRKAEKNGHYKAYLKQVLEPEIMYSKNGKKNKTISSFEIVKAKVPYKQVILDGDKKFMLASSTYVQNAKQLTLSQYSMQAITDNCENDTEEEKALVEAYDEILTNIDKYLPLFDINKFREKLHAGREKFVDLPLAEKKETILQVLNGLHDNAVMPKIKSLGLSTPLGFMQFHTGVSLSENAKLIYQSPTGLFEKRLKISDL

SEQ ID NO: 484 - protein, 270 aa, Lactobacillus iners
MITYLKDNDDITLSFPKDQLINIFKNSNLNSTEKSDQLKPFFGRTNLEKGIIKLLSGGKQDLSNMFRDETLKNSNYKNLKFSDNRFDDERDGYAADLGDRIDLLILLKQIYDASILESMMSQARVSIDGHKYISSAKVCAYEKHKSDLKRLKSLIKKYLPSEYNNIFRKITEKDNYVAYSKSNITNNKREKALKYVKYVDFTKYLTKKLKTIKTQDAEDDQEIFEIKGELEKQSFLPKQRTLDNSIIPYQLHLMELKKYLIINLNIMTFC

SEQ ID NO: 485 - protein, 255 aa, Lactobacillus iners
MITYLKDNDDITLSFPKDQLINIFKNSNLNSTEKSDQLKPFFGRTNLEKGIIKLLSGGKQDLSNMFRDETLKNSNYKNLKFSDNTFDDERDGYAADLGDRINLLILLKQIYDASILESMMSQARVSIDGHKYISSAKVCAYEKHKSDLKRLKSLIKKYLPSEYNNIFRKITEKDNYVAYSKSNITNNKREKALKYVEYVDFTKYLTKKLKTIKTQDAEDDKEIFEIKGELEKQSFLPKQRTLDNSIIPYQLHLME

SEQ ID NO: 486 - protein, 343 aa, Lactobacillus iners
MLAKDDQEGITVKDKIISLLTFRLPYYIGPVNPAVHGKFAWVKRLANGKVTPWNYKEKIDIDASHEEFIKTKLSKCSFLIGCDVLPKNSLLYQKYMVLSELNTIKFNGVNISEKLKDDIYQNLFKNIQKVTKKRLQNYIKEHENIIGDVIVTGIDNAFKQGLVSYLKFKKIIGDKIDDDRYQKVLEKIIRDITLYDECAGKKIKKEYKDSDLFTEDELNKIVKLTFNDWGRLSAELLDQLEGEDTVSGETGKIIEFMQKHNYNLMQLMSKKFTFKYKIDEINKSYYQHDKFNYKSMIDSLYVSPATKRILWQSLKVVHEISKIMKHDPEKIFYRNGTFQRRSS

SEQ ID NO: 487 - protein, 447 aa, Lactobacillus iners
MLYDHKLIGDKKYARLIRSKAFTDDELAGFIARQLVETRQATKETADLLKRLCPKSRIVYAKAQNASIFRQKFDIPKSRTINDLHHAQDAYLNIVVGNIFDTKFTQDPRNFIKNTKDSRNYNLEKIYDYNVERNNYVAWIAPDSKTNGTIANVKCNLSTKDFRVTRPSFYKKGALFNQNLSRKGSNLAPIKEHSPKSNPLKYGGYSGKNNSFFVVVAGKDNKGKDIVKLIPVNTLIYNKMLHCDYKAKQELLTSYVANNFAINNFRIVKDDIKMYSLVKIDGAYYYLVGGTDERIEVKNAMQLLLSKDSIKAVKILEKESKDQFANIKNYKDIDIKLGRTFNEVISKYTNSVFGKSMLISDKYRKDIFKSVDKSILEFNSLNTIAKADNLLKFVTSMRPAGSVDALKMVGLIERIRKSNVISNFNEFKLINQSVTGLFENEEDLLKL

SEQ ID NO: 488 - protein, 667 aa, Lactobacillus iners
MQKHNYNLMQLMSKKFTFKSKIDEINKSYYQHDKFNYKSMIDSLYVSPATKRILWQSLKVVHEISKIMKHDPEKIFIEMARSKEDHPKRKLSRKADLKQVYKDSKKQIISIIGKDKYQDLSNELDNKDDRDLRWDNLYLYYTQLGRSMYSLKPIDISELMNKNLYDQDHIFPKSKKYDDSIENRVLVEKELNVKKSDIYPISDANIIPQKIKGQVESFWKMLYDHKLIGDKKYARLIRSKAFTDDELAGFIARQLVETRQATKETADLLKRLCPKSRIVYAKAQNASIFRQKFDIPKSRTINDLHHAQDAYLNIVVGNIFDTKFTQDPRNFIKNTKDSRNYNLEKIYDYNVERNNYVAWIAPDGETNGTIANVKCNLSTKDFRVTRPSFYKKGALFNQNLSRKGSNLAPIKEHSPKSNPLKYGGYSGKNNSFFVVVAGKDNKGKDIVKLIPVNTLIYNKMLHCDYKAKQELLTSYVANNFAINNFRIVKDDIKMYSLVKIDGAYYYLVGGTDERIEVKNAMQLLLSKDSIKAVKILEKESKDQFANIKNYKDIDIKLGRTFNEVVSKYTNSVFGKSMLISDKYRKDIFKSVEKSILEFNHLDTIGKADNLLKFVTLMRPSGSAHSLKMVGLIERIRKSNVISNFNEFKLINQSVTGLFENEEDLLKL

SEQ ID NO: 489 - protein, 1395 aa, Lactobacillus jensenii; identical to SEQ ID NO: 113

SEQ ID NO: 490 - protein, 1382 aa, Lactobacillus mucosae
MDIGTNSIGWTAIDDHFSLLRVKGKNAIGVRTFKEGETAADRRGFRTARRRLSRRRWRLQFLDEFFAPYLAEVDPNFLARLKQSDISAKDPAKNQEYMGKLLFPDQEAASDGNGYPTLIQMRKAMPAEKAADFPVFNIYQLRYALMNEKRKFDLREIYLAVHHIVKYRGNFLNNTSVDKFKADQIDFNKSFETLNDLFRQVQPIAPFQIDLTKVDELGKLLLDTKQKKLDRQKAVAKLLPLIEDGTDKEIVKAHQQTAREISKLILGYKAKVGLILQNNLDQTLDMSTENSDDQLMQIAEELDDYQMELINQLSLLYSQIMLNEIVPNGETVSASMLNRYYKHRCQLKELKDYGAAQDKKTREQLDHLYAEYIGQIPKDSKFDFTKDLKKLMDKSDLGQKIKDEIEAGDYLPKQRTSANGVIPHQMHQQELDQIIENQKEYYPWLAEPNPVEKNIKNAKYKLDQLVSFRVPYYVGPMITLADQQKTSKASFAWAVRKKAGKITPWNFYDMIDREKSANNFIKRMTNKDTYLLSEDVLPASSLLYQKFTVLNELNNIRVNGRKLQPALKQAIYTDLFQKRKTVNLKTLTNFLAIHEPTLTKPKIEGLSNGRSFNSSLGTYIDMSKILGDSLDDLNYRDDIEKIIEWSTVFEDSEIYGVKLQEIQWLTNEQREKLVRKRYQGWGRLSKKLLTGITDENGQRIIDLMWDTSKNFMQIVHQPVFEEQIAELNQQLLQDADKAPLEVVDDILADAYTSPQNKKAIRQVVKVVADVVKAVGNAPASISIEFARNEDRNKELKNSRRHSIEKLYHETAEKLVKQTNLLEELGNVKDLNDRYYLYFTQAGRDMYDGTPINIDEISTHYEIDHILPQSFLKDNSLDNRVLVKKSENAAKSDRVPAKLYGAKMRAFWKQLKESQLISNRKYLNLTTDPEQVDKYQMQGFVHRQLVETRQIIKLAANIFGSLYPDSAVIETRAELTKQLREKFSLYKVRDVNDYHHAVDAYLTAFAGHYLYQRYPKLRPMFVYGDYAKIYADDLKRLRSVNLFHDLEKDQYNSGTAVNPETKEKIVDVDWLSDYVSKIQHFKYMLISKAVYTQHGQLYGATILPVAQVDKISAPIGIKDDKPVDIYGAYTNEVAAYMAIVRVNGKKPKYKVVSVPVRMLQRLKMAEQKGHDQYMQTLHDVLLRNFTSLKKNRKTGLKEAVVKDFDVLVPCVRYNQLVIDGDTKFTLGSATYQHNAKQLVLCNHSLETLANNFEYVRKHPDEADERMIMLYDDILDQVNHYFTLYDKNKFREKLNAGRDKYLKLPTFSQFENNKKTAIGKSEAIINILRGLHANAAITNLKCLGVSTPFGQLQSPSGIELSENAKLVYQSPTGLFSREVLLKDL

SEQ ID NO: 491 - protein, 1382 aa, Lactobacillus pentosus
MKKIVNYNLGLDIGTSSIGYAAIDDQGRPVRHQNKTVMGVRLFKEGKTAESTRIFRGTRRRLSHRHWRLGYLDRIFDNEIAKVDENFLPRLKASKRARSDEKRSFRGSLLFPETGDDAYYQKYPTIYHLRYALITQKKQFDIRLIYLALHHMIKYRGNFLDTTPVSAFNIHDIDLTDQFASLNDCYQLLDMDFEFQFDLNNIEQVQKLLLDETLSKTKRQAAVSKVLVMSTGNKAFDDQQNGIASEFIKALLGGPFDLSKILNLSVADVKSWKLHMTDKDVDDTLNSLVEELDENHKQIVNLLQMIYSQVMMLGLLNGQQSISASMIERYDDHAKHWAALKKLLPALGEQEQSTIIHAYTAYTGHSRTKQLSRAEFYTKVNSILKKHENIAEATGLIELIDRNEFMPKQRDAVNGVIPHQLHQRELQLIIQNQQKYYPFLAAKAYPDADETMIEQLLSFRVPYYAGPLVDRDFINESSDQEQAMQNTKFSWLKRREAGEITPWNFEQKVDVQETANRFIKRLTTKDTYLMTEDVLPKESLIYQRFEVLNELNAIRINDRRLTAENKQLAFQQLFMAGNTKNVSIKKFRNFVFDSLKFPEKVKITGFAGQHNFLAKLSTYHDFKKIFGERVDHTDLQPDFERIVEWCTIFEDRHIYREKLKEIQWLSQSEIDQLVLIRNHGWGRLSKRLLTGIRDSDGRTVMDQLWFGTDNFMRIISQSDFAAAIANENRTQLNQHGLEDVLDSAFMSPQNKKAIRQVLKVVDDIEQTLGCPPKKVMIEFTRSPDKKKQRTVTRLEKVQQAYKAVADQLAGQSIVSELDQYANTHSKLSDTYYLYFMQLGRDLYSGKPIDIDSPMLDDDHILPRAFMKDNSLDNRALTEKPINNTKAAKFPSKVFGQQKEVTDFWKLLRRCGLMSNIKEKHLYLDPDNVDKWTRRGFIHRQLVETSQVIKIVANILNDRYQQSQTEVLEVPARLGTELRECFGWYKVREVNDYHHVFDAYLAAFIGNYLYRRYPKLQPYFVYGNFAELNKAQLKNIKSFNFLYNITDNKRVVKDIETGQTLWDDQIRQQIQHIYEYKYMLTSHEAFTQHKELYGQTIYPRREFKPGTLKAIKQDQPQELYGGYKNLTAAYMCIVKIQARKRRAAEYRVVRVATESLSALQQAKRLGVQAYERCLRQELVRNNEILRTNADPNSAPREFEVLLDRVLCHQMIISDGQKYLLGSHAYKINCMQLVLSNNSMKILSTSIVKLKQMTNEPLVQVYREILDVVNKYFTLYDVNSFRENLNQFFDKFRTLPITNEYESSKSGKKLIHRGQLETLTLILRGLHANSDKVQYGDQSTLLGGFQTKDGIKLSKDSVIQYTSPAGLNVRTVKLRDLEQKEAQK

SEQ ID NO: 492 - protein, 1361 aa, Lactobacillus pentosus
MNEPYGVGLDIGTNSVGWTVVDMNGRVRKVKGKTALGARLFKEGATAEDRRGFRTTRRRLKRVKWRLRLLREFFDQPISKIDPNFFARRKYSDISPRDPNYNGLAKTLFNDRTDKEFYDDYATIYHLRDKLMTSNRKFDIREIYLAIHHIVKYRGNFLRTGPASQYGSASLHLATSFQKLNDLFAQSEETLNLKLVTDEALLQQIQQILVRTDLSRSEQQRQIWPLMAVLTGASAAEKKRQKNVVVELSKALVGLKAKMNVVTLTEVDAAVVKDWTFTMEESQDKLPEIEEQLSEVGQQIMDEVIQLYASVNLAQLIPAGKRFSQHMVEKYKHHEKNLELLKAYIHSQSDSKRGREIRATYDRYIDGVDSKPVTQEMFYKDLMKYVEADATSNHLAAEIKDEIDSEQFMPKLRTKQNGSIPYQVQQYELDQIISHQKKYYPWLGEENPVAERRGKFPYKLDELVGFRVPYYVGPLITKEDQQATSGAGFAWMVRKADGPITPWNFDQKVDRIASATAFIQRMQTTDTYLIGEDVLPARSLIYQRFMVLNELNNMRVEDRKLAPQQKQRLYNQVFKQHQHVSVKNIQQNLMDAGEYRKTPQITGLADPKGFNSSLSTYHDFKKILLEAIADEHKRADIEKIILWSTTFEDSAIFKQKLEEVAWLTDAQRKQLSGLRYRGWGQLSHKLLTAFKDDKGRSIMDGLWETSDNFMQLRKQPAIETQIKEANQANLTDADIQDTINELYTSPQNKKAIREVMLVLDDIKNAMHGQTPSWIFVEAARGGGVAGRRTQSRSSQIVEAYKGTAKEIVSEKVQHELNEKIKAKADFNTRLVLYFLQNGRDLYTNEAINIDRLSEYDIDHILPQSLVKDDSLDNRVLTSARINREKNDTFASEKFGRKMGAQWRELHRNGLMTQRKLKHLLMRPDEISKHATDFINRQLVETRQVIKLVEELISSEYPAASIVAVKANLTHQFRQTFNFPKLREVNDYHHAFDASLTAFIGMYLLKQYPKLERFFVYGKFAKQPINLTRFNIIRKLAVAEKPIANIETGEILWDKTADIKYFEKLYNYKRLLVTHEVRENYGAMFKQTLFKASYNKSKTLVPKKNHMETSVYGGYSNQETAYLAIVRIPFKSGFKFIVVGIPTRMVAKIKHYQSLGATLNQATHKVIEPKFTKISRKTKQTVISDYEVVLPKVYLDQVVRDQVKGQMYRFSLGSDKEYHNVQELYLPLSIQQAFVGHYDESDDQRSNDLVKVYDAALKQLQRYFPLHLSRNFDQVASQAHQSFEGLKNNVQTSDKQLGKKEVLNSLFVGLHANATRSNLSVLGMSKDFGRIKSNGITLTDQAEIIYQSPTGLFERKVALKDL

SEQ ID NO: 493 - protein, 1358 aa, Lactobacillus pentosus
MNEPYGVGLDIGTNSVGWTVVDMNGRVRKVKGKTALGARLFKEGATAEDRRGFRTTRRRLKRVKWRLRLLREFFDQPISKIDPNFFARRKYSDISPRDPNYNGLAKTLFNDRTDQEFYHDYPTIYHLRDKLMTSDRKFDIREIYLAIHHIVKYRGNFLRTGPASQYGSASLHLATSFQKLNDLFAQSEESLNFKLVTDEAQLQQIQQILVRTDLSRSEQQRQIWPLMVVLMGATAAEKKRQKDFAKELANALVGLKAKLNVVTLTNVDTTVVKDWTFTLEESQDKLPEIEEQLSEVGQQIMDEVIQLYASVNLAQLIPAGKRFSQHMVEKYNHHEKNLELLKAYIHSQSDSKRGREIRATYDRYIDGVKSKPVTQEMFYKDLMKYVEADATSNHLAAEIKDEIDSEQFMPKLRTKQNGSIPYQVQQYELDQIISHQKKYYPWLGEENPVAERRGKFPYKLDELVGFRVPYYVGPLITKEDQQATSGAGFAWMVRKADGPITPWNFDQKVDRIASATAFIQRMQTTDTYLIGEDVLPARSLIYQRFMVLNELNNMRVEDQKLAPRQKQRLYNQVFKQHQHVSVKNIQQNLMDAGEYRETPKITGLADPKGFNSSLSTYHDFKKILPEAIADEHKRADIEKIILWSTTFEDSAIFKQKLEEVAWLTDAQRKQLSGLRYRGWGQLSHKLLTAFKDDNGRSVMDGLWETSDNFMQLRKQPAIETQIKEANQANLTDADIQDTINELYTSPQNKKAIREVMLVLDDIKNAMHGQTPSWIFIEAARGGGVAGRRTQSRSKQIVEAYKSTAKEIVSEKVQHELNEKIKAKADFNTRLVLYFLQNGRDLYTNEAINIDRLSEYDIDHILPQSLVKDDSLDNRVLTSARINREKNDTFASEKFGRKMGAQWRELHRNGLMTQRKLKHLLMRPDEISKHATDFINRQLVETRQVIKLVEELISSEYPSASIVAVKANLTHQFRQTFNFPKLREVNDYHHAFDASLTAFIGMYLLKQYPKLERFFVYGKFAKQPINLTRFNVIRKLAVAEEPIANIETGEILWDKTADIKCFEKLYNYKRLLVTHEVRENYGAMFDQTIFKATDSRKRLIQKKKGFATETYGGYTGRTLAYLAIVKVVTNKDTQYQVVGIPTTMVTQIQQLEASGLTSKQAVTKAIGAMINENNKKLQSYEVLLPKVRFEQVVRDEVKGHIHRFALGTDTYYHNIQELYLPLTIQRAFLGKRNDTDAQTEQNLLTVFETTLAQVNRYFPLYEMNKFKQILNSAQEKFAALPTKNKTVKNKLVTGKDGVLNNLFIGLHANASLGDLKILGMKIGFGKLQVPGGLKLTDQAEIIYQSPTGLFERKVALKDL

SEQ ID NO: 494 - protein, 1358 aa, Lactobacillus plantarum
MKEPYGVGLDIGTNSVGWTVVDASGHVRKIKGQTGIGVRLFKEGAAAADRRGFRTTRRRLKRVKWRLRLLREFFDQPISKVDINFFARRKYSDVSPRDPNYNGLEKTLFNDRSDQDFYHDYPTIYHLREALMTQHRKFDVREIYLAIHHIVKYRGNFLRNDAATAYRSGTLDLQQHFETLNHLFSQADLELNLNLTTDVALLDSIKQTLVRTDISRSDRQKLIMPLLAVLTGATTAEKKRQKAVVTEFAKALVGNKTKIDVLTLTDIDATEAKDWAFSLEENQDKLPGIEDRFSEVGQQIIDEVIRLYASVNLAQLIPEGKRFSQSMVEKYKRHGEDLKLLKAYIRSQSDAKRGRAIRATYDQYIDGVKSKQVTQEAFQKALGKFVDADVDLNSWAAQIKQAIDSEQFMPKLRTKQNGAIPYQVQQNELDQIISNQKEYYPWLGEENPVIKRRGKFPYKLDELFGFRVPYYVGPLITKEMQAATANAGFAWMVRKADGPITPWNFDDKVDRVASATAFIQRMQTTDTYLIGEEVLPARSLIYQRFMVLNELNNIRVDDGQLTPRQKQRLYNQVFKKHKRVTAKNIQDNLVAAREFPTAPRITGLADPKVFNSSLSTYHDLKQVLPEAMSDVRKQADIEKIILWSTIFEDSTIFKQKLTEISWLTAAQLKQLGQLRYRGWGQLLRKLLTGLKDDNNRSIMDGLWETNANFMQLRSQPAIENQIKSANQANLTTADLQDTINELYTSPQNKKAIREVMVVLADIKDAMHGQTPNWIFVEAARGGGVAGRRTQSRSKQIVAAYQGTAQAIVRDQVQRELKEKIKNKANFNTRLVLYFLQNGRDLYTGDAINIDRLSEYDIDHILPQSLVKDDSLDNRVLTNARINREKNDTFASEKFGKKMGAKWKEMHRMGLMTKRKLDHLLMRPDEISKYATGFINRQLVETRQVIKLVEELINAEYPSTAIVSVKANLTHQFRQTFDFPKIREVNDYHHAFDAALTAFIGTYLLKRYPKLERFFVYGKFAKQPVNLTRFNVIRKLAKTDTPITDIDTGEVLWDKLTDIKYFETLYDYKRLLVTREVSENYGAMFDQTLLKASDNGKRLIRKKQSFDTAIYGGYTGKTLAYMAIVKVSTKKDVQYQVVGVPTTMVTQIEQLEQQGMTNKQAVTKVIEPLIAANNKKMLTYEVLLPKVRFEQVVRDRIKGQTHRFALGTDTYYHNIQELYLPLTLQRAFLGKQNESEVQLNQNLLTVFDATLAQVNRYFPLYEMNKFKKILNSARDQIELLEAKNQFVKNKLVLGKQGILTNMFIGLHANASYGDLKVLGVKIDFGKLQVPGGIKLTGDAEIIYQSPTGLFERKIALKDL

SEQ ID NO: 495 - protein, 1361 aa, Lactobacillus rhamnosus
MTKLNQPYGIGLDIGSNSIGFAVVDANSHLLRLKGETAIGARLFREGQSAAERRESRTTRRRLSRTRWRLSFLRDFFAPHITKIDPDFFLRQKYSEISPKDKDRFKYEKRLFNDRTDAEFYEDYPSMYHLRLHLMTHTHKADPREIFLAIHHILKSRGHFLTPGAAKDFNTDKVDLEDIFPALTEAYAQVYPDLELTFDLAKADDFKAKLLDEQATPSDTQKALVNLLLSSDGEKEIVKKRKQVLTEFAKAITGLKTKFNLALGTEVDEADASNWQFSMGQLDDKWSNIETSMTDQGTEIFEQIQEHYRARLLNGIVPAGMSLSQAKVADYGQHKEDLELFKTYLKKLNDHELAKTIRGLYDRYINGDDAKPFLREDFVKALTKEVTAHPNEVSEQLLNRMGQANFMLKQRTKANGAIPVQLQQRELDQIIANQSKYYDWLAKPNPVEKHRASKPYQLDELLTFRIPYYVGPLITPKEQAESRENVFAWMIRKDPSGNITPYNFDEKVDCPASANMFIQRMKNTDTYLIGEDVLPKRSLLYQKYEVLNELNNVSIDGRRLGADQKQRLIREVFERHSSVTIKQVAENLVAHGDFAKRPEIRGLADEKRFLSSLSTYHQLKKILHEAIDDPTKEHDIENIITWSTVFEDAAIFKTELAKISWLDSDTIKALSNIRYRGWGQFSRKLLDGLKLGNGHTVIQELMLSNHNLMQILTDETLKTTMAELNQDKLKADDIEDVINDAYTSPSNKKALRQVLRVVEDIKHAANGQDPSWLYIETADGPGTAGKRTQSRQKQIQTVYANAAQELIDSAVRGELEDKIADKASFTDRLVLYFMQGGRDIYTGAPLNIDQLSHYDIDHILPQSLIKDDSLDNRVLVNATINREKNNVFASTLFASKMAATWRKWHEAGLISGRKLRNLMLRPDEIDKFAHGFVARQLVETRQIIKLTEQIAAAQYPNTKIIAVKAGLSHQLREELDFPKNRDVNHYHHAFDAFLAARIGTYLLKRYPKLAPFFTYGEFAKVDVKKFREFNFIGALTHAKKNIVAKDTGEIVWDKERDIQELDRIYNFKRMLITHEVYFETADLFKQTIYAAKDSKERGGSKQLIPKKQGYPTQVYGGYTRENTAYLAVVKTVEKKADVYRVVRIATSQVAALKEARAQSTVKERELLKKFLTTKFTKIGKNGKKAITPFDIVIPRVPREQLFHNKRYGFFMVNSDTLMHNYQELWMSRSDQQILSKLVKSAKTVENGQVGRLFENIVEQINKYFPLYDINQFRKKLDQSKDIFSKLPLEGNGTTSGKRETIQNILTGAGTGAKNGDLKNLGIKTPFGFLQVPSGIVLDDDTTLIYQSPTGMLNRIVRLSEL

SEQ ID NO: 496 - protein, 1361 aa, Lactobacillus rhamnosus
MTKLNQPYGIGLDIGSNSIGFAVVDANSHLLRLKGETAIGARLFREGQSAAERRESRTTRRRLSRTRWRLSFLRDFFAPHITKIDPDFFLRQKYSEISPKDKDRFKYEKRLFNDRTDAEFYEDYPSMYHLRLHLMTHTHKADPREIFLAIHHILKSRGHFLTPGAAKDFNTDKVDLEDIFPALTEAYAQVYPDLELTFDLAKADDFKAKLLDEQATPSDTQKALVNLLLSSDGEKEIVKKRKQVLTEFAKAITGLKTKFNLALGTEVDEADASNWQFSMGQLDDKWSNIETSMTDQGTEIFEQIQELYRARLLNGIVPAGMSLSQAKVADYGQHKEDLELFKTYLKKLNDHELAKTIRGLYDRYINGDDAKPFLREDFVKALTKEVTAHPNEVSEQLLNRMGQANFMLKQRTKANGAIPVQLQQRELDQIIANQSKYYDWLAKPNPVEKHRASKPYQLDELLTFRIPYYVGPLITPKEQAESRENVFAWMIRKDPSGNITPYNFDEKVDCPASANMFIQRMKNTDTYLIGEDVLPKRSLLYQKYEVLNELNNVSIDGRRLGADQKQRLIREVFERHSSVTIKQVAENLVAHGDFAKRPEIRGLADEKRFLSSLSTYHQLKKILHEAIDDPTKEHDIENIITWSTVFEDAAIFKTELAKISWLDSDTIKALSNIRYRGWGQFSRKLLDGLKLGNGHTVIQELMLSNHNLMQILTDETLKTTMAELNQDKLKADDIEDVINDAYTSPSNKKALRQVLRVVEDIKHAANGQDPSWLYIETADGPGTAGKRTQSRQKQIQTVYANAAQELIDSAVRGELEDKIADKASFTDRLVLYFMQGGRDIYTGAPLNIDQLSHYDIDHILPQSLIKDDSLDNRVLVNATINREKNNVFASTLFASKMAATWRKWHEAGLISGRKLRNLMLRPDEIDKFAHGFVARQLVETRQIIKLTEQIAAAQYPNTKIIAVKAGLSHQLREELDFPKNRDVNHYHHAFDAFLAARIGTYLLKRYPKLAPFFTYGEFAKVDVKKFREFNFIGALTHAKKNIVAKDTGEIVWDKERDIQELDRIYNFKRMLITHEVYFETADLFKQTIYAAKDSKERGGSKQLIPKKQGYPTQVYGGYTRENTAYLAVVKTVEKKADVYRVVRIATSQVAALKEARAQSTVKERELLKKFLTTKFTKIGKNGKKAITPFDIVIPRVPREQLFHNKRYGFFMVNSDTLMHNYQELWMSRSDQQILSKLVKSAKTVENGQVGRLFENIVEQINKYFPLYDINQFRKKLDQSKDIFSKLPLEGNGTTSGKRETIQNILTGAGTGAKNGDLKNLGIKTPFGFLQVPSGIVLDDDTTLIYQSPTGMLNRIVRLSEL

SEQ ID NO: 497 - protein, 1352 aa, Lactobacillus ruminis
MNDNFDLMRVKGKKGIGVRLYNEGQSAAERRMHRTARRRYGRRKWRLRLLEDFFDEHMAEVDDTFFARLKDSNISPKDDKKYRKSLLFPKSKGVTYQDDGEFYKKYPTMYHLRYALMTEHRKFDLREIYLAFHHMVKYRGNFLYDTSVDSFEAKNLDIKGKFDEINDLLSSYTDFYVDNSNAALVESILLEKNTTRKDKSKKIAKLLHVEDKEKGKNKKAKDLATQISNAVLGLKCNFHLIFELQQKYSFDLCSEKTEENIAKLSEVLDENQKMLLMILKEVQDQVMLNAFVPSGMSLSEAMMQKYDDYGEQLKIYHELEHSVSDDSAAKLRGAYRDYNDNIIKRIDGDNKKDTFYKRVKNILTKISKEYVDQDVLESCGKLKKLIDENKLFIRQRTAANGVLPHQLHQIEMRKIIDNQKEYYPWLAEPNPNEKRRVYSKYKVEELIAFRIPYYVGPLVDPNNADKNKEARFSWMVRKKDGEITPWNFYDKVDWAESANNFIERMKSKDTYLLGEDVVPKESMLYQKYEVLNELNNLRINDSGLSDSFEDVKLKQAIYNDLFKKQKIVKITDLQNYLVQNHKYLVKPKISGLADENRFLSSLSTYSDLKTIFGDKVDDRTYFNDFEKMVEYSTVFEDGHDYNQKLDEYTWLTKEEKYKIGKKRYRGWGKLSKKLLTGLRDKNNHTIMDNLWETNRNFMQIQTADEFSKQIAEENERHLKGSVSDAINDMYTSPANKKAIRQVLRVVDDIQKAMGYAPSSISLEFAREDGPSVRTVSRANRMKSIYEKYASEVSEEVMKDLDGVIKDKKGLNDRLYLYFEQQGKDMYSGHPLDFDKVISGQEYDIDHILPQAVIKDDSLDNRVLTTKALNNDVKSKGVPCRMFNGMHSFWKNLYDKGFISRRKFNNLTTNPENIDKYKMKGFVNRQLVETRQIIKLVANVLNDKYQNDDVDIIEVRAELTHDVRKHFKFYKNRNVNDYHHAFDAYLTSFIGHYLFKKYPNLRPLFDYNDFMKVSDNVFKQLRGNNFLGEFLNKTGDIISTDGNFVLNKEEMINKLNKAYAFKKILVTKEVGQRTGAMFNETRYPAPNSRKAALKYRRMPKPDSLISVKDYKNTDIYGGYSGKNDAYMVIVDMGKQYMVVGVPVRYTEKLDKLRIKHSELYRDELRKVLSRDKTLLDSKGNVKRFDIVLDRVLYGQLIEDGNELFTLGSSKYKRNFRQLFLDKQCIEILDSSATPQPTDEELIWVYDQILDKVDKYFELYDINRQRETLRKGRAAFCSLPNISMKKDDVTKKKILNEILVALHANESESNCEKIGKKVFGRLQVPGGIKLSKEAKLIYQSPTGLFERVVYLKDL

SEQ ID NO: 498 - protein, 1339 aa, Lactobacillus salivarius
MERYHIGLDIGTSSIGWAVIGDDFKIKKKKGKNLIGTRLFNEGATAAERRGFRTQRRRLNRRKWRLKLLEEIFDPYMAEVDEYFFARLKSSNLSPKDSNKKYLGSLLFPDKSDSNFYDKYPTIYHLRRDLMEKDEKFDLREIYLAIHHIVKYRGNFLEKVPAKNYKNSGASIGFLLEEVNSLYKDIIGDESIAILNSEKFEDVEKIILDEETRNLDKQKSVGKLLVEDKKKKNIVTAFSKAIFGYKFNIEDLLLIENDEKNKLTFNDENIDDIFNELSHSLDDKQMDLLTKTREIYFKFKLNMIVPTGYTLSESMIEKYEMHKAHLKMYKEFINTLNTKDRKILKNAYSDYINTEKAKAANAQENFYKTVKKIIKDNNSDTAKKIIVLIDEGNFMPKQRTGENGVIPHQLHQIELDRIIENQAKYYPWLAEANPVEKNRKFAKYKLDELVTFRVPYYVGPLIDKTESNKNEKETKFAWMVRKAKGTITPWNFENLVDRTESANRFIKRMTSKDTYIIGEDVLPASSLLYEKFKVLNELNNIKVNEKKLDIEQKQDIYLNLFTTAKNVTKKSLATYLNCSADSISGLSDGEKFNSSLSSYIDLKAILGNIVDDCNKNEDLEKIIEYSTVFEDGNIYKEKLSEISWLTDEQIEKLSNIHFKGWGRLSKKLLTQITNENGERIIDALWNTSNNFMQIINDESIQAKLAEINGKYAGKSDLEDILSEAYTSPQNKKAIRQVMKVVEDIEKAMQCEPTSISIEFTRKKQKSRLTNTRYKKISDVYEKIADEVISEYELRKLQSELDSNANNMRDRYYLYFMQLGRDMYTGEKINIDELHQRYDIDHILPQSFIKDDSINNRVLTRKDVNNKEKSDKTAADLYAVEMSDFWRKLRKQGLITEQKYKNLLTKSDSIDKYAKKGFIKRQLVETSQVVKLVANILQDKYSDTKIIEVRAKLNSNLREEYKLIKNRAVNDYHHAIDGYLTTFIGQYLYKTYPKLRSYFVYNDFKKLDSNYLKHMKKFNFLWQLQDDKTIDIYDNVNNKFVLNVPEMKKYIQKIYNYKYMLVSKEVTTKNGAFYDQTKYNAKTVNLIPIKKNKPTNIYGGYKGKVSSYMMLVKIRKKKEVIYKFVGVPRLWTDELDRLKDTTERKILLNEIAKNSLSKTEQDFEVILDKVYYGQLIIDGNQKYTLGSSEYKYNAMQLHLSKHALEVLAKENVKDAEITDKDLVSVYEEILSVVNKYFELYDINKFRQKLNEGLEIFRKLPVYNVYESNKIKQVGKFEVLNRILMGLHANAMITDLKVLGIKTKLGQMQVNGGIKLSPDAKLIYQSPTGIFSRAVRVKDLG

SEQ ID NO: 499 - protein, 629 aa, Lactobacillus salivarius
MERYHIGLDIGTSSIGWAVTGDDFKIKRKKGKNLIGTRLFKEGNTAAERRGFRTQRRRLNRRKWRLKLLEEIFDPYMAEVDEYFFARLKDSNLSPKDSNKKYLGSLLFPDISDSNFYDKYPTIYHLRRDLMEKDEKFDLREIYLAIHHIVKYRGNFLENVPAKNYKNSGASIGFLLEEVNNLYKDIVGDENVTILNSEKFEDVEKIILDDGIRNLDKQKGVGKLLVEDKKNKNLVTAFSKAIFGYKFNIEDLLLVEGDEKSKLTFNDENIDDIFNELSHSLDDRRMDLLTKTREIYFKFKLNMIVPTGYTLSESMIEKYEIHKAHLKMYKEFINTLNSKDRKILKNAYTDYINNEKAKAANAQENFYKTVKKTIKDNDSDIVKKIIDLIDEGNFMPKQRTGENGVIPHQLHQIELDRIIENQAKYYPWLAEENPVEKNRKFAKYKLDELVTFRVPYYVGPLVDKTESNKNEKETKFAWMVRKSKGTITPWNFENLVDRTESANRFIKRMTSKDTYIIGEDVLPASSLLYEKFKVLNELNNIKVNEKKLDIEQKQNIYLKLFTTTKNVTKKNLATFLNCSIESISGLSDDKKFNSSLSSYIDLKVILGDIVDDYSKNEDLEKIIEYSTIF

SEQ ID NO: 500 - protein, 897 aa, Lactobacillus salivarius
  misc_feature (822)..(822): Xaa can be any naturally occurring amino acid
MLIESDEKNKLTFNDENIDDIFNELSHSLDDNQMDLLTKTREIYFKFKLNMIVPTGYTLSESMIEKYEMHKAHLKMYKEFINTLNAKDRKILKNAYSDYINNEKAKAANAQENFYKTIKKTIKDNNSDTAKKIIGLIDEGNFMPKQRTGENGVIPHQLHQIELDRIIENQAKYYPWLAEENPVEKNRKFAKYKLDELVTFRVPYYVGPLVDKTESNKNEKETKFAWMVRKAKGTITPWNFENLVDRTESANRFIKRMTSKDTYIIGEDVLPASSLLYEKFKVLNELNNIKVNKKKLDVEQKQHVYLDLFTTRKNVTKDNLATSLNCDVESITGLSDNEKFNSSLSSYIDLKAILGNAVDDCNKNKDLEKIIEYSTIFEDGNIYKEKLSEISWLTDEQIEKLSNIHFKGWGRLSKKLLTQITNENGERIIDALWNTSNNFIQIISDESIQAKLAEINGEYADKSNLEDILDEAYTSPQNKKAIRQVMKVVEDIEKAMKCKPTSIAIEFTRRKGKSKLTNTRYKKISETYEKITDELISEYELGKLQSKLDSKANNMRDIYYLYFMQLGRDMYTGEKINIDELHQYYDIDHIFPRSFIKDNSLNNRVLTRKEINNNEKADRTAADLYAVKMGDFWRKLRKQGLITEKKYKNLLTRTDSIDKYTKQSFIKRQLVETSQVVKMAANILQDKYSNTKIIEVRARLNSDLRKEYELIKNREVNDYHHAIDGYLTIFIGQYLYKTYPKLRSYFVYDDFKKLDSNYLKHMDKFNFIWKLEDKKAEDVYDNVNNEFILNVPKMKDYIQKIYNYKYMLISKEVTTESGAFYXZTKYNAKTINLIPIKKDKPTNIYGGYKGKVSSYMMLVKIQKKKEVIYKFVGVPRLWTDELDRLIDTDEKKALLKK

SEQ ID NO: 501 - protein, 1419 aa, Lactobacillus sp.
MAKPQNYTIGLDIGTNSVGWTVTDDQNNILRIKSKKAIGARLFEEGKVAAERRSFRTTRRRLSRRKWRIKLLEELFDEEISKVDPNFFARSHESWISPKDKRERYSAIVFPTPEEDKKFHNEYPTIYHLRDRLMKDDQKHDIREIYVAIHHIMKYRGNFLHDESIETYRSGMSSLGGGDERTILNTKILDDLNDAFADNLATQGISVNSASADQINEIVTSGHLNVDSQKAIAKLLLPTTLSSDDKKQDKKIKKLATDAAKNVASAWLGYKANFAAILNIQEVDKDKKKIYSFALQGADEEDKVETLESVLSQDQIEIVDRIIRIRHAIVLGEIIPVGMTLSEAMIEKYDQHAKDLKNLKTVIRNLKDRKNAVKLQAIYDLYVNNRHADTAKAMKLAGVKKRTELLEPEEFNKSIEKLLDDSPVSAEIKKRIAEKDFLPLQRSNSNGVIPNQLHQIELDEIIKKQSKYYPFLGETNEHASADVARKAPTKLDQLLTFRVPYYVGPLITKEEQEEQDGHSFAWMIRKNPKDHEKITPWNFDEKVDRMASATQFIKRMTTKDTYLLGEDVLPSSSLKYQLFTVLNELNNLRINHKKLTREEKEQVIEDLFKKYKTVKADKFKNYWQKGHAGLDVKIQGMADPEKFNSTMSTYIDLQKIFGDQLDDAQRQNDFEKIIEYSTIFEDRKILGEKLRADFVWLSEDQIKRLCRLRLQGWGRLSLKLLTRLTDADGQNVLERLLNSNDNFMQIVKDPVIKAKIEQKNQKLLRADWSENATESILDEAYTSPQNKKAIRQVMRVVHDIVKACDGNLPAKFAIEFARSQDDDPKRTVARADRLQKIYAQISDEVVSQGVKDQLSGMKSLKDRYYLYFMQGGRDAYTGKPLNIDRLSDYDIDHIMPQSFIKDDSLDNRVLVTRAVNNQKSDNVPVLLYGNHLVADLGITIREMWDRWQKSGMISKRKLANLLTDPATLSEYRAEGFINRQLVETSQVIKLTATILQSEFPDSKIIEVPAKYNSILRKQFDLYKSREVNDYHHAIDAYLSTIVGNYLYQVYPNLRRLFVYGEFKKFSHGEEESSHQAVRRVKSMNFLDDLLRGKHGDDIYCRVTGEVIFSRKDIISKLKQAYSFKQMLVTQEVFTKKSALFDQTVYPSPARDSKTRSGLIPRKQGMDTEIYGGYSGNKDAYFVLAQVVKSKGHTLQVVGVPIRALRALANCSNYSEQLLKIVKAQVLFNKKTGKAKKGISDVRILLDKIPYRQPVLDGSAFYMLGSSTYKYNLKQISLSQQSMKYILDYIDDPNFNKHEMTKIDQQNEKECLLSVYDEILDKMDKYLSLYDINGFRKKLHVGRDKFIKLEVEKQAEAIKNVLRGFHANSDMTKLSDLGLSTSLGFMQASDGIKLSDNAVFIYQSPTGLFERRVKVSDLLK

SEQ ID NO: 502 - protein, 1289 aa, Lactobacillus versmoldensis
MRRRYRRRRNRLNWLDELFADELAKIDPSFLLRMKNSWVSKKESTRKRDPYNLFIDEKYNDVDYFNQYPTIFHLRKELITEDKKVDIRLIYLAIHNIIKYRGNFTLENQNFDISQLSSNFSQQISDFFALFSDFGVIMPEDFDPDKISDILLNPNLSPSGKVSEAIATISPKTNVKAKIKIILLLLVGNNGDLKKLFDLETTEKIAVKLSSRHIDSELPIILSELNEQQENIITIANSIFGSIILKDFLGDETSISAAKVISFEDHKQDLQKLKTMWRETSNKEAVKAGKKAYEDYIGHEDSETFYKKIKKFLEKAQPVDLANKALAEIELENYLPKQRNRNNTVIPYQLNENELIAILDHQEKYYPFLKENRDKILSLLTFRIPYYVGPLQDSNNNRFSWMTRKASGAIRPWNFSEKVNVEQSSNDFIKRMRSTDTYLIGEPVLPKKSLIYQCYEVLSELNNTRVKDGSSNPKRLDVTIKQRIYNEIFKNQKSVSVKVLQNWLIKESYFKSPEISGLADKKKYLSSLSTYIDFKKIFGQRFVDDPVNSPQLEELAEWLTLFEDKKILLIKLQNSKYSYDQATINKLSTMRYQGTGKLSKKLLVDLKTTKKSIGKSGAESLSILDLMWSTKDNFMQIIHDADYTFEQQIKEFNYDTEDELTPLEKVANLHGSPALKRGLNQSIKVVADIVKFMGHDPEKIFIEFTRSDDFSKLTISRYRRIKKQYLEIAKAIKKIPAEFKDIKEYQTQLEENKGKLASERLMLYFLQCGHSLYSNKPIDLNMINSSKYHVDHILPQSYIKDDSLENKALVLASENENKIDNMLISHDIIATNLPRWQALKDQNLMGSKKFADLTRTTVTENQKKGFIQRQLVQTSQIVKNITLILNDLYKNTSCIETRATLSSEFRKAFSNFDETTYHYQFPEFVKNRDVNDFHHAQDAFLACVIGEYQLKKYPKDNLRLVYDQYSKFLDSLKKDTRKKNGRMPRYTQNGFIIGSMFNGKTYVDDNGEIIWDQKIKESIRKTFNYHQFNVVRQTIEQHGKLFNDTIQPHSDRYKLIPLKTNRDPAIYGGYNNDNNAYSVVLDVDGKKKINGIPIRIANQLKSDELDLSSWLENNIKHKKPMTILIDKVPKYQRIINEETGDLLITSANEVINNVQLFLPSMYTALISLLDSTKTEMYSKLLSNYEANILIDIYDYLLTKLKNNYPLYRKEWAKLAEHRDDFIESDLVTQASTLQQLIKFMHADPSNVNLKFGNFKGNRFGRKNGNIKLSKTDFIYESPTGLFKSIKHID

SEQ ID NO: 503 - protein, 1372 aa, Legionella pneumophila
MESSQILSPIGIDLGGKFTGVCLSHLEAFAELPNHANTKYSVILIDHNNFQLSQAQRRATRHRVRNKKRNQFVKRVALQLFQHILSRDLNAKEETALCHYLNNRGYTYVDTDLDEYIKDETTINLLKELLPSESEHNFIDWFLQKMQSSEFRKILVSKVEEKKDDKELKNAVKNIKNFITGFEKNSVEGHRHRKVYFENIKSDITKDNQLDSIKKKIPSVCLSNLLGHLSNLQWKNLHRYLAKNPKQFDEQTFGNEFLRMLKNFRHLKGSQESLAVRNLIQQLEQSQDYISILEKTPPEITIPPYEARTNTGMEKDQSLLLNPEKLNNLYPNWRNLIPGIIDAHPFLEKDLEHTKLRDRKRIISPSKQDEKRDSYILQRYLDLNKKIDKFKIKKQLSFLGQGKQLPANLIETQKEMETHFNSSLVSVLIQIASAYNKEREDAAQGIWFDNAFSLCELSNINPPRKQKILPLLVGAILSEDFINNKDKWAKFKNFWNTHKIGRTSLKSKCKEIEEARKNSGNAFKIDYEEALNHPEHSNNKALIKIIQTIPDIIQAIQSHLGHNDSQALIYHNPFSLSQLYTILETKRDGFHKNCVAVTCENYWRSQKTEIDPEISYASRLPADSVRPFDGVLARMMQRLAYEIAMAKWEQIKHIPDNSSLLIPIYLEQNRFEFEESFKKIKGGSSDKTLEQAIEKQNIQWEEKFQRIINASMNICPYKGASIGGQGEIDHIYPRSLSKKHFGVIFNSEANLIYCSSQGNREKKEEHYLLEHLSPLYLKHQFGTDNVSDIKNFISQNVANIKKYISFHLLTPEQQKAARHALFLDYDDEAFKTITKFLMSQQKARVNGTQKFLGKQIMEFLSTLADSKQLQLEFSIKQITAEEVHDHRELLSKQEPKLVKSRQQSFPSHAIDATLTMSIGLKEFPQFSQELDNSWFINHLMPDEVHLNPVRSKEKYNKPNISSTPLFKDSLYAERFIPVWVKGETFAIGFSEKDLFEIKPSNKEKLFTLLKTYSTKNPGESLQELQAKSKAKWLYFPINKTLALEFLHHYFHKEIVTPDDTTVCHFINSLRYYTKKESITVKILKEPMPVLSVKFESSKKNVLGSFKHTIALPATKDWERLFNHPNFLALKANPAPNPKEFNEFIRKYFLSDNNPNSDIPNNGHNIKPQKHKAVRKVFSLPVIPGNAGTMMRIRRKDNKGQPLYQLQTIDDTPSMGIQINEDRLVKQEVLMDAYKTRNLSTIDGINNSEGQAYATFDNWLTLPVSTFKPEIIKLEMKPHSKTRRYIRITQSLADFIKTIDEALMIKPSDSIDDPLNMPNEIVCKNKLFGNELKPRDGKMKIVSTGKIVTYEFESDSTPQWIQTLYVTQLKKQP

SEQ ID NO: 504 - protein, 907 aa, Leptospira inadai
MAKSIEEIRSIQNEFVVEYSILLKKIKKGEIDKKNDVYKVYQNTIKSSERLEQVLKERLGFQNVSKSYFNNPYSIAQLYNLISVDRSGFSKVCRSCQEENHWRSTLIDTDRGPQAQASKQVSDTGRPFDGQLAMLLDRIAFEIVKLKRIEIERLLSNKNSSKIEVVEIPLLIEENSFNFRYELAELKKLSKKKKDQLKKSVEEFDTKLNSKQERIKAASRELCPYTGKKISKGEIDHILPRSWTQKQFGTALNAEANLIYASREGNQSKGNREYGLNDLDEKYLNIIFGTKEVDSIQRNISDTIDRLDIERGTTRIVFDRLAPNERDCLRHALFIKSLRPKVFELLSGQLKARVNGTQLYLAKRIRSLLLKNQDFITKSLIIKVPSFSFYEPRTVDLPYMRKELAEKFPNLGKQNPQPTGSHIIDAAMVMAYAVETDSGNLSFGSKDKSEGFDSESLSRFLPSNIQFLSIKSKDKTDSKYPYKKPLFKDGVFGERFLPILIAEKGLRVGYTLENSLEVNSENPEEFFNVLKPYLLFKRKPIESNYQTLVAFAQKDKRGYIVLPVNKPKALESISQRKSDPHTSILKNILYTVSRESIPSLIFDKNTLIPEIKSNKVNWGDKLEKKFRIKIEIKLYGKKIADGFIRYPGKTEWEKLLLTEPLKGLVKNKTLTPKWFDSLENLAGLDDHFKDTSNPEAKHKRKSNHYALPVPKGPSGGFRIRRNSFDGYKVYQLYSVDGNSFHAFKIENGWTGKTLLLDIYQNSGNLHSLDYDYENTDISQTALFSKFYKIEFSKEETQKINSKGIKSLYVAPGSSSRQYIRVIFDKQTFSKFIKFQSKFWEFDLITPLPKDKAKDLIESILKIFPEDLRPKKPRNDIHIQNISHDSVQVEYIADGKTQGFGQYFINQN

SEQ ID NO: 505 - protein, 418 aa, Leptospira inadai
MILKSPIAIDLGAKNTGIVYTTYQPNALPTEIHGATIISDNLKLSQVDRRAKRHQRRNYTRMKLARRLVYLIIRYHYRIPEQDLTPEVKTSLQSLLTRRGYTFQSIETEGNELGQAPWGEIEDYFPNVQDYEKSLPIQTVLYHFFSSENLELNKLVPSKEPETKEDKNILKYIREQKEAFESEQNNGARHRLKYFEEIKEDFPRKIKLMECLQKNKIEEKKFLNLIQNISNLQIKPLRAYFNDKDMKEKEIWEPRRLHTYIARWIRSWHIDPKNSSKRLIRQKLLSQLENGKLKIIRDTSIYSPSKDIISFLEEIDPKDTIPPYEDQNNRHPPRCQNLWLDGKILDRYFPGWEQSLWKLIRNEKNNPFEQLITKDFRTDDTISEGKSLSEQIQIYERSHSNIKLDVRAVILQRFLDRS

SEQ ID NO: 506 - protein, 125 aa, Leptospira inadai
MSAYDRSANLDPWSLRLQGKAKKEIKTTESLSKTDLQKASDAYEKIKEILSESDTDQFIKLANRYYLEVADIKKGMWLPTAPERKHKEIPKSIAHEENQDISLFHKCNTKTGSKKRISQVSLEMF

SEQ ID NO: 507 - protein, 1355 aa, Leuconostoc gelidum
MTYSIGLDIGTGSVGWAVIGDDYRLKRAKGKNLIGVRLFDSATTAAERRGYRTTRRRLSRRHWRLRLLNDIFASDLAEQDENFLPRLKYSWVNPDDEQNPQLNSDVANGALFGSSETDKAFHKNYPTIYHLRHELMTDTAKHDLREVYLAIHHIVKYRGNFLNTADKINAENSFNVDLFIAALDEYNEFLETPITSIKDAQLFSDKLTDINARNKSVRVENAMSETYDDKSKIFKAILTALVGNTANFQTIFDLSDLEKDEAKNFKFKLDLEDVETKLDVVRAKLSDEQNAFLEAVLIAYDGITLKMILGDYKSISQSMIESYKSHQRDWKYIKNNVRLNEQKIEPDKNSVKFFKLDPKKLIYPSNLAYLQVISSNEDEHRKGLDYFKTAIQDADILQRIENDTFLPRQRTKRNGVLPYQLHLAELEQIIKKQSKYYPFLANIYTQDNKTENKLIGLLKFRVPYYVGPLVEAEKVTGDGKNHWLIKKELQENTPITPFNFDDVVDKDKSGEQFIKRITGTDSYLIGEPTLPENSLLYQKYNVLQELNNVRNERHQRLPIKVKQDIFEHVFKIDKNVNAKKVMAYLKLNGYGDFQIAGLSDTRTGKFNSNLSSYNYFVDLLGREKTEKIREDRLEEIIEIQTVFEDKILVAKRLSNLDFLTPQEKSKLSAKHYTGWGRLSQKLLTTQFIKTALSEAGDIIPQSHSIIDLLYYTDKNLMEILNDKTFNVRNWLTEQNKGTESGNSLYDQIDALAGPKDIKRGITQVFSIIDDIKKAMGSNPETVYLEFARETQTSRLTNSRLNRVQEIYNSPELKTEFAYLAKKLEAETKESIHDDRLYLYYLQEGRDMYTGKEIPFDQISSNYDIDHIIPQAFTKDDSLDNRVLVNRATNARKSNSPTFTNDIIDNRKSWWQSLVKRGLMSKEKFERLTDKRKTFSENQTNHFIARQLVETRQIIKNVADLIKNNYDGTQAVAIRASLTGEMRRYLDWPKNRDMNDYHHAHDALMMATVGKYVDRRGFFDNGSVSDGAGNAYNLYTKDWLVAARVGTRNDSQRVNPYGFIVGSMNSKAVRQQVNKETGEIVWGNENLDYLRHVLSYKKILVTRRLSGSSGRLYAETLFSPNPKAKLIAQKANRSVALYGGFTKAESAYTALVEFNKKGDRSYKLIKVPMAIANRVNDKQITVTAYIASLNLRDFSRVVLEHLPLGTLIRESDGSEFYAASSEYKHNAKELWAPKEILRSSKKLDKATADNLIDIFDFLTNDKTISNFKFYEKDLLHLKNVRDKFVEASDEIKIKVLSDVIYELHNDAGWRDPFKHIQEKPAWTMLQVKGGIKLSEKAAIVYQSPTGLFETITIVGE

SEQ ID NO: 508 - protein, 883 aa, Leuconostoc pseudomesenteroides
MIGVRLFEGADTAAERRGYRTTRRRLSRRRWRLRLLNDIFASELSKIDENFLPRLKYSWVNKNDTDNVHFGVGVFDNSEQEKAFYQDYPTIYHLRQKLMTDNRQHDLREVYLAIHHIVKYRGHFLNSGEISANSSFDAQKFLELLREFDNTFYPDAVKFLNLDQLDLPDKISSEISDSKISKSERVDRVLQHVQLANSGAKKILKAILNAVVGNSVDSVAMFSLSDLDKEEKKKINHPVTDSKPFKYSDKEVEAKLDELSNLLQDEQKIEFLSLLKLSFDGLTLKMLLGNAKSVSEAMVERYKVHKDDLKFIKENILNSFSKDKKKEFDKYYEAHLAEKDVDNVDKYFKKIIDDSIISKDKKIELLQKIDDHDFLPSQRSKINGAIPHQLHRNELDKIISQQSKYYPFLADSYTQNGKTETKLAGLVNFRVPYYVGPLVSKENADRNNPDGGQNHWVEFKENTSLSNLTPWNFNEIVDKDKSAAKFIERLTGMDTYLIGEPTLPQNSLLYQKYNVLQELNNIRVDNHKLDVKIKQDVFEHLFKTQNSVSAKDVKNYLIANGYAAPSIQITGLSDTNEKTFNSKLSSYNYLVDKLGRTFVESVKSDVLEKIIELQTVFEDKTVLLRQLSMISELTLAQANQLAEKHWTGWGRLSRKLLSSKVVDVNKITNSTFYPATSRQTIIDTLYHTQLNLMEIINNAEDLYGVRQWISEQNKSDSSDTNDVYDQIQELAGDKKIKRGITQSFRILDDIVKAMGGEPERVYLEFARENQQSGVSFSRKNLLSKLYENDSLKQTFKELKSQLESETKENLQNDRLYLYYLQQGRDMYSNDELNIDQLSSYDIDHIIPQAYTKDNSFDNRVLVSSKANRLKRMLLWYPVKLSKK

SEQ ID NO: 509 - protein, 468 aa, Leuconostoc pseudomesenteroides
MKDQGFISKRKFENLTRRGDFSEQQKERFIARALVETRQIIVNVSSLIDSHFNHTKAVAVKSNMTTDMRHYTKVPKNRDINDYHHAHDALFVATVGQYIENKGFMKAGKLSDSVGNEYNRYTKKWIETARKNTNYGRVNPFGFVVGSMQTATRGKLDYETGELKVVKNNYWSKDDLDYLLKVVSYKKILVTTKLQDNKGAMYDANLISAKGSGKKKAQLQISKSKNIDLYGGFNKLQNEYSVLILNHDEYRWLSIPMYARNSSEQYLHDKYPDAKVILNHILVGQPILLSNSSDPQKSKFASLRIATGGDYHNNFEFVPSVDVKKILDNIYLNHSVTDDEYKKVFESLLATLHDKFVFGIHQVMYNKIFDNKYLFDKMPDEAKRNVINSLLKFMNISKNQLGAVGKIGGKVNGVLYGFKTETEKGTSAGQLISNGKMQPHDIFIFQSPTGIFERRVTVAELANVIKDE

SEQ ID NO: 510 - protein, 1103 aa, Listeria innocua
LKLYPGEKSTGMFAQFISLIVGSKGNFQKPFDLIEKSDIECAKDSYEEDLESLLALIGDEYAELFVAAKNAYSAVVLSSIITVAETETNAKLSASMIERFDTHEEDLGELKAFIKLHLPKHYEEIFSNTEKHGYAGYIDGKTKQADFYKYMKTTLENIEGADYFIAKIEKENFLRKQRTFDNGAIPHQLHLEELEAILHQQAKYYPFLKENYDKIKSLVTFRIPYFVGPLANGQSEFAWLTRKADGEIRPWNIEEKVDFGKSAVDFIEKMTNKDTYLPKENVLPKHSLCYQKYLVYNELTKVRYINDQGKTSYFSGQEKEQIFNDLFKQKRKVKKKDLELFLRNMSHVESPTIEGLEDSFNSSYSTYHDLLKVGIKQEILDNPVNTEMLENIVKILTVFEDKRMIKEQLQQFSDVLDGVVLKKLERRHYTGWGRLSAKLLMGIRDKQSHLTILDYLMNDDGLNRNLMQLINDSNLSFKSIIEKEQVTTADKDIQSIVADLAGSPAIKKGILQSLKIVDELVSVMGYPPQTIVVEMARENQTTGKGKNNSRPRYKSLEKAIKEFGSQILKEHPTDNQELKNNRLYLYYLQNGKDMYTGQDLDIHNLSNYDIDHIVPQSFITDNSIDNLVLTSSAGNREKGNDVPPLEIVQKRKVFWEKLYQGNLMSKRKFDYLTKAERGGLTEADKARFIHRQLVETRQITKNVANILHQRFNYGKDDHGNTMKQVRIVTLKSALVSQFRKQFQLYKVRGVNDYHHAHDAYLNGVVANTLLKVYPQLEPEFVYGDYHQFDWFKANKATAKKQFYTNIMLFFAQKDRIIDENGEILWDKKYLDTVKKVMSYRQMNIVKKTEIQKGEFSKATIKPKGNSSKLIPRKTNWDPMKYGGLDSPNMAYAVVIEYAKGKNKLVFEKKIIRVTIMERKAFEKDEKAFLEEQGYRQPKVLAKLPKYTLYECEEGRRRMLASANEAQKGNQQVLPNHLVTLLHHAANCEVSDGKSLDYIESNREMFAELLAHVSEFAKRYTLAEANLNKINQLFEQNKEGDIKAIAQSFVDLMAFNAMGAPASFKFFETTIERKRYNNLKELLNSTIIYQSITGLYESRKRLDD

SEQ ID NO: 511 - protein, 1337 aa, Listeria innocua
MKNMKKPYTIGLDIGTNSVGWAVLTDQYDLVKRKMKIAGDSEKKQIKKNFWGVRLFDEGQTAADRRMARTARRRIERRRNRISYLQGIFAEEMSKTDANFFCRLSDSFYVDNEKRNSRHPFFATIEEEVEYHKNYPTIYHLREELVNSSEKADLRLVYLALAHIIKYRGNFLIEGALDTQNTSVDGIYKQFIQTYNQVFASGIEDGSLKKLEDNKDVAKILVEKVTRKEKLERILKLYPGEKSAGMFAQFISLIVGSKGNFQKPFDLIEKSDIECAKDSYEEDLESLLALIGDEYAELFVAAKNAYSAVVLSSIITVAETETNAKLSASMIERFDTHEEDLGELKAFIKLHLPKHYEEIFSNTEKHGYAGYIDGKTKQADFYKYMKMTLENIEGADYFIAKIEKENFLRKQRTFDNGAIPHQLHLEELEAILHQQAKYYPFLKENYDKIKSLVTFRIPYFVGPLANGQSEFAWLTRKADGEIRPWNIEEKVDFGKSAVDFIEKMTNKDTYLPKENVLPKHSLCYQKYLVYNELTKVRYINDQGKTSYFSGQEKEQIFNDLFKQKRKVKKKDLELFLRNMSHVESPTIEGLEDSFNSSYSTYHDLLKVGIKQEILDNPVNTEMLENIVKILTVFEDKRMIKEQLQQFSDVLDGVVLKKLERRHYTGWGRLSAKLLMGIRDKQSHLTILDYLMNDDGLNRNLMQLINDSNLSFKSIIEKEQVTTADKDIQSIVADLAGSPAIKKGILQSLKIVDELVSVMGYPPQTIVVEMARENQTTGKGKNNSRPRYKSLEKAIKEFGSQILKEHPTDNQELRNNRLYLYYLQNGKDMYTGQDLDIHNLSNYDIDHIVPQSFITDNSIDNLVLTSSAGNREKGDDVPPLEIVRKRKVFWEKLYQGNLMSKRKFDYLTKAERGGLTEADKARFIHRQLVETRQITKNVANILHQRFNYEKDDHGNTMKQVRIVTLKSALVSQFRKQFQLYKVRDVNDYHHAHDAYLNGVVANTLLKVYPQLEPEFVYGDYHQFDWFKANKATAKKQFYTNIMLFFAQKDRIIDENGEILWDKKYLDTVKKVMSYRQMNIVKKTEIQKGEFSKATIKPKGNSSKLISRKTNWDPMKYGGLDSPNMAYAVVIEYAKGKNKLVFEKKIIRVTIMERKAFEKDEKAFLEEQGYRQPKVLAKLPKYTLYECEEGRRRMLASANEAQKGNQQVLPNHLVTLLHHVANCEVSDGKSLDYIESNREMFAELLAHVSEFAKRYTLAEANLNKINQLFEQNKEGDIKAIAQSFVDLMAFNAMGAPASFKFFETTIERKRYNNLKELLNSTIIYQSITGLYESRKRLDD

SEQ ID NO: 512 - protein, 953 aa, Listeria ivanovii
MKKMLANIDGADYFIDQIEEENFLRKQRTFDNGTIPHQLHLEELEAILHQQAKYYPFLRKDYEKIRSLVTFRIPYFIGPLANGQSDFAWLTRKADGEIRPWNIEEKVDFGKSAIDFIEKMTNKDTYLPKENVLPKHSLCYQKYMVYNELTKIRYIDDQGKTHHFSGQEKQQIFNGLFKQQRKVKKKDLERFLYTINHIESPTIEGVEDAFNSSFATYHDLQKGGVTQEILDNPLNADMLEEIVKILTVFEDKRMIKEQLQSFSDVLDGTILKKLERRHYTGWGRLSAKLLTGIRDKHSHLTILDYLMNDDGLNRNLMQLINDSNLSFKSIIEKEQVSTADKGIQSIVAELAGSPAIKKGILQSLKIVDELVGIMGYPPQTIVVEMARENQTTGKGKNNSKPRFISLEKAIKEFGSQILKEHPTDNQCLKNDRLYLYYLQNGKDMYTGKELDIHNLSNYDIDHIIPQSFITDNSIDNRVLVSSTANREKGDNVPLLEVVRKRKAFWEKLYQAKLMSKRKFDYLTKAERGGLTEADKANFIQRQLVETRQITKNVANILYQRFNCKQDENGNEVEQVRIVTLKSTLVSQFRKQFQLYKVREVNDYHHAHDAYLNGVVANTLLKVYPQLEPEFVYGDYHQFDWFKANKATAKKQFYTNIMRFFAKENQIIDKNGEILWDNRYLDTIKKVLSYRQMNIVKKTEIQKGEFSNATVNPKGNSSKLISRKADWNPIKYGGFDGSNMAYSIVIEYEKRKKKTVIKKELIQINIMERVAFEKDQKAFLEEKGYYSPKVLTKIPKYTLYECENGRRRMLGSANEAQKGNQMVLPNHLMTLLYHAKNCEANDGESLAYIEMHREMFAELLAYISEFAKRYTLANDRLEKINMFFEQNKKGDIKVIAKSFDKLKVFNAFGAPRDFEFFETTIKRKRYYNIKELLNATIIYQSITGLYEARKRLED

SEQ ID NO: 513 - protein, 232 aa, Listeria ivanovii
MMSKLILGLDIGISSVGWGVLDESTNEVVDAGVRLFEEATRNGNEDRRGFRSARRLKRRRQHRLERAKGLIENNGFSCTDINKFNPYQARYNAIFGEVTKDELAAALFHLVKRRGTTIDAPEEEVKDVENELSTKMQLEKNAKKLATKYDYICEIQLEKLKENKVVRDHENRFRTEDYVKEARAILENQQEYYPEVTNEFIESYMALIETRRMYYDGPGSEKSPTPYGQYFI

SEQ ID NO: 514 - protein, 300 aa, Listeria monocytogenes
DDGLNRNLMQLINDSNLSFKSIIEKEQVSTTDKDLQSIVADLAGSPAIKKGILQSLKIVDELVSIMGYPPQTIVVEMARENQTTVKGKNNSRPRYKSLEKAIKEFGSQILKEHPTDNQELRNNRLYLYYLQNGKDMYTGQELDIHNLSNYDIDHIVPQSFITDNSIDNLVLTSSAGNREKGDDVPPLEIVRKRKVFWEKLFQGNLMSKRKFDYLTKAERGGLTEADKATFIHRQLVETRQITKNVANILHQRFNNETDNHGNNMEQVRIVMLKSALVSQFRKQFQLYKVREVNDYHHAHD

SEQ ID NO: 515 - protein, 782 aa, Listeria monocytogenes
  misc_feature (722)..(722): Xaa can be any naturally occurring amino acid
IFNDLFKQKRKVKKKDLELFLRNINQIESPTIEGLEDSFNASYATYHDLLKVGMKQEILDNPLNTEMLEDIVKILTVFEDKRMIKEQLQQFSDVLDGVVLKKLERRHYTGWGRLSAKLLVGIRDKQSHLTILEYLMNDDGLNRNLMQLINDSNLSFKSIIEKEQVSTTDKDLQSIVADLAGSPAIKKGILQSLKIVDELVSIMGYPPQTIVVEMARENQTTVKGKNNSRPRYKSLEKAIKEFGSQILKEHPTDNQELKNNRLYLYYLQNGKDIYTGQELDIHNLSNYDIDHIVPQSFITDNSIDNLVLTSSAGNREKGDDVPPLEIVRKRKVFWEKLYQGNLMSKRKFDYLTKAERGGLTEADKARFIHRQLVETRQITKNVANILHQRFNNETDNHGNTMEQVRIVTLKSALVSQFRKQFQLYKVREVNDYHHAHDAYLNGVVANTLLKVYPQLEPEFVYGEYHQFDWFKANKATAKKQFYTNIMLFFAQKERIIDENGEILWDKKYLETIKKVLDYRQMNIVKKTEIQKGEFSKATIKPKGNSSKLIPRKENWDPMKYGGLDSPNMAYAVIIEHAKGKKKIVIEKKLIQINIMERKMFEKDEEAFLEEKGYRHPKVLTKLPKYTLYECEKGRRRMLASANEAQKGNQLVLSNHLVSLLYHAKNCEASDGKSLKYTEAHRETFSELLAQVSEFATRYTLADANLSKINNLFEQNKEGDIKXIAQSFVDLMVFNAMGAPASFKFFEATIDRKRYTNLKELLSSTIIYQSITGLYESRKRLDD

SEQ ID NO: 516 - protein, 1334 aa, Listeria monocytogenes; identical to SEQ ID NO: 109

SEQ ID NO: 517 - protein, 1334 aa, Listeria monocytogenes
MKNPYTIGLDIGTNSVGWAVLTDQYDLVKRKMKVAGNSDKKQIKKNFWGVRLFDDGQTAVDRRMNRTARRRIERRRNRISYLQEIFAVEMANIDANFFCRLNDSFYVDSEKRNSRHPFFATIEEEVAYHKNYRTIYHLREELVNSSEKADLRLVYLALAHIIKYRGNFLIEGALDTKNTSVDEVYKQFIQTYNQVFMSNIEEGALAKVEENTEVASILAGKFTRREKFERILRLYPGEKSTGMFAQFISLIVGNKGNFQKVFNLVEKTDIECAKDSYEEDLEALLAIIGDEYAELFVAAKNTYNAVVLSSIITVTATETNAKLSASMIERFDAHEKELGELKAFIKLHLPKQYQEIFNNAEIDGYAGYIDGKTKQVDFYKYLKTTLENVEGADYFITKIEEENFLRKQRTFDNGVIPHQLHLEELEAILHQQAKYYPFLREGYDKIKSLVTFRIPYFVGPLANGQSEFAWLTRKDDGEIRPWNIEEKVDFGKSAVDFIEKMTNKDTYLPKENVLPKHSLCYQKYMVYNELTKIRYIDDQGKTNYFSGREKQQIFNDLFKQKRKVKKKDLELFLRNINHIESPTIEGLEDSFNASYATYHDLLKVGLKQEILDNPLNTEILEDIVKILTVFEDKRMIKEQLEQFSDVLDGVVLKKLERRHYTGWGRLSAKLLVGIRDKQSHLTILDYLMNDDGLNRNLMQLINDSNLSFKSIIEKEQVSTTDKDLQSIVADLAGSPAIKKGILQSLKIVDELVSIMGYPPQTIVVEMARENQTTGKGKNNSKPRYKSLEKAIKDFGSQILKEHPTDNQELKNNRLYLYYLQNGKDIYTGQELDIHNLSNYDIDHIVPQSFITDNSIDNLVLTSSAGNREKGGDVPPLEIVRKRKVFWEKLYQGNLMSKRKFDYLTKAERGGLTEADKARFIHRQLVETRQITKNVANILHQRFNKETDNHGNTMEQVRIVTLKSALVSQFRKQFQLYKVREVNDYHHAHDAYLNGVVANTLLKVYPQLEPEFVYGEYHQFDWFKANKATAKKQFYTNIMLFFAQKERIIDENGEILWDKKYLETIKKVLDYRQINIVKKTEIQKGEFSKATIKPKGNSSKLIPRKENWDPMKYGGLDSPNMAYAVIIEHAKGKKKIVIEKKLIQINIMERKMFEKDEEAFLEEKGYHQPKVLTKLPKYTLYECEKGRRRMLSSANEAQKGNQLVLSNHLVSLLYHAKNCEASDGKSLKYIEAHRETFSELLAQVSEFATKYTLADANLSKINNLFEQNKEGDIKAIAQSFVDLMAFNAMGAPASFKFFEATIDRKRYTNLKELLSSTIIYQSITGLYESRKRLDD

SEQ ID NO: 518 - protein, 1334 aa, Listeria monocytogenes
MKNPYTIGLDIGTNSVGWAVLTDQYDLVKRKMKVAGNSDKKQIKKNFWGVRLFDDGQTAVDRRMNRTARRRIERRRNRISYLQEIFAVEMANIDANFFCRLNDSFYVDSEKRNSRHPFFATIEEEVAYHKNYRTIYHLREELVNSSEKADLRLVYLALAHIIKYRGNFLIEGALDTKNTSVDEVYKQFIQTYNQVFMSNIEEGALAKVEENTEVASILAGKFTRREKFERILRLYPGEKSTGMFAQFISLIVGNKGNFQKVFNLVEKTDIECAKDSYEEDLEALLAIIGDEYAELFVAAKNTYNAVVLSSIITVTATETNAKLSASMIERFDAHEKELGELKAFIKLHLPKQYQEIFNNAEIDGYAGYIDGKTKQVDFYKYLKTTLENVEGADYFITKIEEENFLRKQRTFDNGVIPHQLHLEELEAILHQQAKYYPFLREGYDKIKSLVTFRIPYFVGPLANGQSEFAWLTRKDDGEIRPWNIEEKVDFGKSAVDFIEKMTNKDTYLPKENVLPKHSLCYQKYMVYNELTKIRYIDDQGKTNYFSGREKQQIFNDLFKQKRKVKKKDLELFLRNINHIESPTIEGLEDSFNASYATYHDLLKVGLKQEILDNPLNTEILEDIVKILTVFEDKRMIKEQLEQFSDVLDGVVLKKLERRHYTGWGRLSAKLLVGIRDKQSHLTILDYLMNDDGLNRNLMQLINDSNLSFKSIIEKEQVSTTDKDLQSIVADLAGSPAIKKGILQSLKIVDELVSIMGYPPQTIVVEMARENQTTGKGKNNSKPRYKSLEKAIKDFGSQILKEHPTDNQELKNNRLYLYYLQNGKDIYTGQELDIHNLSNYDIDHIVPQSFITDNSIDNLVLTSSAGNREKGGDVPPLEIVRKRKVFWEKLYQGNLMSKRKFDYLTKAERGGLTEADKARFIHRQLVETRQITKNVANILHQRFNKETDNHGNTMEQVRIVTLKSALVSQFRKQFQLYKVREVNDYHHAHDAYLNGVVANTLLKVYPQLEPEFVYGEYHQFDWFKANKATAKKQFYTNIMLFFAQKERIIDENGEILWDKKYLETIKKVLDYRQINIVKKTEIQKGEFSKATIKPKGNSSKLIPRKENWDPVKYGGLDSPNMAYAVIIEHAKGKKKIVIEKKLIQINIMERKMFEKDEEAFLEEKGYHQPKVLTKLPKYTLYECEKGRRRMLSSANEAQKGNQLVLSNHLVSLLYHAKNCEASDGKSLKYIEAHRETFSELLAQVSEFATKYTLADANLSKINNLFEQNKEGDIKAIAQSFVDLMAFNAMGAPASFKFFEATIDRKRYTNLKELLSSTIIYQSITGLYESRKRLDD

SEQ ID NO: 519 - protein, 1099 aa, Listeria monocytogenes
MKNPYTIGLDIGTNSVGWAVLTDQYDLVKRKMKVAGNSDKKQIKKNFWGVRLFDDGQTAVDRRMNRTARRRIERRRNRISYLQEIFAVEMANIDANFFCRLNDSFYVDSEKRNSRHPFFATIEEEVAYHKNYRTIYHLREELVNSSEKADLRLVYLALAHIIKYRGNFLIEGALDTKNTSVDEVYKQFIQTYNQVFMSNIEEGALAKVEENTEVASILAGKFTRREKFERILRLYPGEKSTGMFAQFISLIVGNKGNFQKVFNLVEKTDIECAKDSYEEDLEALLAIIGDEYAELFVAAKNTYNAVVLSSIITVTATETNAKLSASMIERFDAHEKELGELKAFIKLHLPKQYQEIFNNAEIDGYAGYIDGKTKQVDFYKYLKTTLENVEGADYFITKIEEENFLRKQRTFDNGVIPHQLHLEELEAILHQQAKYYPFLREGYDKIKSLVTFRIPYFVGPLANGQSEFAWLTRKDDGEIRPWNIEEKVDFGKSAVDFIEKMTNKDTYLPKENVLPKHSLCYQKYMVYNELTKIRYIDDQGKTNYFSGREKQQIFNDLFKQKRKVKKKDLELFLRNINHIESPTIEGLEDSFNASYATYHDLLKVGLKQEILDNPLNTEILEDIVKILTVFEDKRMIKEQLEQFSDVLDGVVLKKLERRHYTGWGRLSAKLLVGIRDKQSHLTILDYLMNDDGLNRNLMQLINDSNLSFKSIIEKEQVSTTDKDLQSIVADLAGSPAIKKGILQSLKIVDELVSIMGYPPQTIVVEMARENQTTGKGKNNSKPRYKSLEKAIKDFGSQILKEHPTDNQELKNNRLYLYYLQNGKDIYTGQELDIHNLSNYDIDHIVPQSFITDNSIDNLVLTSSAGNREKGGDVPPLEIVRKRKVFWEKLYQGNLMSKRKFDYLTKAERGGLTEADKARFIHRQLVETRQITKNVANILHQRFNKETDNHGNTMEQVRIVTLKSALVSQFRKQFQLYKVREVNDYHHAHDAYLNGVVANTLLKVYPQLEPEFVYGEYHQFDWFKANKATAKKQFYTNIMLFFAQKERIIDENGEILWDKKYLETIKKVLDYRQINIVKKTEIQKGEFSKATIKPKGIPAN

SEQ ID NO: 520 - protein, 1334 aa, Listeria monocytogenes
MKNPYTIGLDIGTNSVGWAVLTDQYDLVKRKMKVAGNSDKKQIKKNFWGVRLFDEGETAADRRMNRTARRRIERRRNRISYLQEIFALEMANIDANFFCRLNDSFYVDSEKRNSRHPFFATIEEEVAYHKNYRTIYHLREELVNSSEKADLRLVYLALAHIIKYRGNFLIEGALDTKNTSVDGVYKQFIQTYNQVFISNIEEGTLAKMEENTTVADILAGKFTRKEKLERILQLYPGEKSTGMFAQFISLIVGSKGNFQKVFDLVEKTDIECAKDSYEEDLEALLAIIGDEYAELFVAAKNTYNAVVLSSIITVTDTETNAKLSASMIERFDAHEKDLSELKAFIKLHLPKQYEEIFSNVAIDGYAGYIDGKTKQVDFYKYLKTLLENIEGADYFIAKIEEENFLRKQRTFDNGAIPHQLHLEELEAILHQQAKYYPFLKEAYDKIKSLVTFRIPYFVGPLANGQSDFAWLTRKADGEIRPWNIEEKVDFGKSAVDFIEKMTNKDTYLPKENVLPKHSLYYQKYMVYNELTKVRYIDDQGKTNYFSGQEKQQIFNDYFKQKRKVSKKDLEQFLRNMSHIESPTIEGLEDSFNSSYATYHDLLKVGIKQEVLENPLNTEMLEDIVKILTVFEDKRMIKEQLQQFSDVLDGAVLKKLERRHYTGWGRLSAKLLVGIRDKQSHLTILDYLMNDDGLNRNLMQLINDSNLSFKSIIEKEQVSTTDKDLQSIVADLAGSPAIKKGILQSLKIVDELVSIMGYPPQTIVVEMARENQTTVKGKNNSRPRYKSLEKAIKEFGSQILKEHPTDNQELRNNRLYLYYLQNGKDMYTGQELDIHNLSNYDIDHIVPQSFITDNSIDNLVLTSSAGNREKGDDVPPLEIVRKRKVFWEKLFQGNLMSKRKFDYLTKAERGGLTEADKATFIHRQLVETRQITKNVANILHQRFNNETDNHGNNMEQVRIVMLKSALVSQFRKQFQLYKVREVNDYHHAHDAYLNGVVANTLLKVYPQLEPEFVYGEYHQFDWFKANKATAKKQFYTNIMLFFAQKERIIDENGEILWDKKYLETIKKVLDYRQMNIVKKTEIQKGEFSKATIKPKGNSSKLIPRKENWDPMKYGGLDSPNMAYAVIIEHAKGKKKVVFEKKIIRITIMERKAFEKDEKSFLEKQGYRQPKVLTKLPKYTLYECENGRRRMLASANEAQKGNQQVLKGQLITLLHHAKNCEASDGKSLDYIESNREMFGELLAHVSEFAKRYTLADANLSKINQLFEQNKDNDIKVIAQSFVNLMAFNAMGAPASFKFFEATIERKRYTNLKELLSATIIYQSITGLYEARKRLDG

SEQ ID NO: 521 - protein, 1334 aa, Listeria monocytogenes
MKNPYTIGLDIGTNSVGWAVLTNQYDLVKRKMKVAGNSDKKQIKKNFWGVRLFDDGQTAVDRRMNRTARRRIERRRNRISYLQEIFAVEMANIDANFFCRLNDSFYVDSEKRNSRHPFFATIEEEVAYHKNYRTIYHLREELVNSSEKADLRLVYLALAHIIKYRGNFLIEGALDTKNTSVDGVYEQFIQTYNQVFMSNIEEGTLAKVEENIEVANILAGKFTRREKFERILQLYPGEKSTGMFAQFISLIVGSKGNFQKVFDLIEKTDIECAKDSYEEDLEALLAIIGDEYAELFVAAKNTYNAVVLSSIITVTATETNAKLSASMIERFDAHEKDLGELKAFIKLHLPKQYQEIFNNAAIDGYAGYIDGKTKQVDFYKYLKTILENIEGADYFIAKIEEENFLRKQRTFDNGAIPHQLHLEELEAIIHQQAKYYPFLREDYEKIKSLVTFRIPYFVGPLAKGQSEFAWLTRKADGEIRPWNIEEKVDFGKSAVDFIEKMTNKDTYLPKENVLPKHSLCYQKYMVYNELTKVRYIDDQGKTNYFSGQEKQQIFNDLFKQKRKVKKKDLELFLRNINHIESPTIEGLEDSFNASYATYHDLLKVGMKQEILDNPLNTEMLEDIVKILTVFEDKPMIKEQLQQFSDVLDGGVLKKLERRHYTGWGRLSAKLLVGIREKQSHLTILDYLMNDDGLNRNLMQLINDSNLSFKSIIEKEQVSTTDKDLQSIVADLAGSPAIKKGILQSLKIVDELVSIMGYPPQTIVVEMARENQTTGKGKNNSKPRYKSLEKAIKEFGSKILKEHPTDNQELKNNRLYLYYLQNGKDMYTGQELDIHNLSNYDIDHIVPQSFITDNSIDNLVLTSSAGNREKGGDVPPLEIVRKRKVFWEKLYQGNLMSKRKFDYLTKAERGGLTDADKARFIHRQLVETRQITKNVANILHQRFNNETDNHGNTMEQVRIVTLKSALVSQFRKQFQLYKVREVNDYHHAHDAYLNGVVANTLLKVYPQLEPEFVYGEYHQFDWFKANKATAKKQFYTNIMLFFGQKERIIDENGEILWDKKYLETIKKVLDYRQMNIVKKTEIQKGEFSKATIKPKGNSSKLIPRKENWDPMKYGGLDSPNMAYAVIIEHAKGKKKLIFEKKIIRITIMERKMFEKDEEAFLEEKGYRHPKVLTKLPKYTLYECEKGRRRMLASANEAQKGNQLVLSNHLVSLLYHAKNCEASDGKSLKYIEAHRETFSELLAQVSEFATRYTLADANLSKINNLFEQNKEGDIQAIAQSFVDLMAFNAMGAPASFKFFEATIDRKRYTNLKELLSSTIIYQSITGLYESRKRLDD

SEQ ID NO: 522 - protein, 874 aa, Listeria seeligeri; identical to SEQ ID NO: 175

SEQ ID NO: 523 - protein, 1087 aa, Listeriaceae bacterium
MKKLVLGLDIGVASVGWGIIDAENGDVVDTGVRLFSSRDASENESRRTSRQSRRLSRRKKHRRERIKQLLLAHDMDICDIVNENPYELRVKGLNEKLEVSEIYVALTHLAKRRGVSYLDDVVEEGGTIKSEHLNKNMEEIKSGKMPCEIQLERFEKYGQVRGMIEINQDTEESSFLVNIFRTSDYIKEAKTILATQQKFHKQITNEFIDEYIHIMASKRDYFIGPGNEKSRTDYGVYRTNGDTWDNLFEILIGKCSVFPEETRAARSSYVAQEFNLLNDLNNLKISNLESGKLSASQKHDIVEKVKNSKKFGTKDLLKYIASVCECKIEDIGGCRVDKNRKPIMHTFENYRKVHNALNEAGVDLRLSETDYDELMKIMTLNSETLEIKKQCKEKLPQLTEDYLNVCLVLNKKGAFSGWHALSLKAMKLMMPELYGTSKNQMQIIHTMQLGKAYLKPLNQQKYLNSEAILEEIYNPIAARSIRQTIKVTNAILKKYGHLDSVIIEMPRDYQTSEDERKMIEKMQKENEKEKKAALKRAREEYPFPDEAFRNHKELATKLRLWYQQDQFCVYSGRKISVVDLVRNPNQFEIDHIIPQSVSLDDSLNNKVLCFSEENQKKGQQTPFYYHKGKSGNWTYEQYKLFVEKLFDKKKISNKKRELLLFEEDINKWDVRRGFIARNLVDTRYASRVILNSYQQYFGNHEMGTKVKVVRGKFTSQLRKKWRIFKDRNESHSHHAIDALIVAATANLRLWKKNTLGVSDEGKVYDKETGEILPFEKLTESEYNEMMNKEPYLNFKTKLQNIETKVKYSYRVSKKVNRKISDATIYSTRERDGIDYIVGKIKNIYDVKTYKDQFLKRYKKNKEQFLMYQHDPQTFAILENIMATYQDAENPFLAYKKEYGVIRKYSKKGGGSPVTSLKFIDKVLGQKIDLTAKNQAALPKNKKVVLQSITPYRADVYYDEIDKRYHLIGVKYSLFSFSKQGYVINPIAYQKLLEKEQIHSEMKFCFSLYREDIIEFGEDPDSLTRYRFWSKNESGKNKIEVKPIEKPNFEKQTVLTITKKIKILNKYQTDVLGNSFKAQEEKDPRNIE

SEQ ID NO: 524 - protein, 1345 aa, Marinilabilia sp.
MKKILGLDLGTTSIGWAFIKEPEKDVVGSEIVDMGVRIVALSSDEENDFAKGNTISINADRTLKRGARRNLQRFKLRRDALLEIFKEMKLIPSNFKYAEDGPSSTFSTLKLRDKAAKEKIELDDLVKVLLQINKKRGYRSSRKAKSEEDDGSAIDSMGIAKELYENDLTPGQWVFEALQKGRKNVPDFYRSDLQEEFKKIVNYQSEFYPDVLNSSFVEDWMGKASTPTKQYFNKKGVHLAENKGKREERRLQEYNWRAVAVNSKIDLSEIALILSQINSQISNSSGYLGAISDRSKELYFKNQTVGQYLYQQIKINPHTRLKGQVFYRQDYLDEFEKIWSVQSGFHPQLNDALKKEIRDITIFFQRRLKSQKHLISNCEFEDYHKVVPKSHPIFQEFRIWQNLNNLTLIKKDNLNEKSELALEDKIALANELAFKREQSVKDALNILGLKSSEWEFNFTKIEGNRTNHAFFEAFAKIIEIEDGEPLDLGNLKADDILDQFSEAFLRIGIDPGLLQVNNDIEGPNYEKQPYIQFWHLLYSSEDDQKLKQNLIKKFGFKPDHAKILASISLQDDHASLSSRAIKKILPHLQSGLIYDKACTYAGYNHSSSFTKEENEKRELSSELDLLKKNSLRNPVVEKILNQMINVVNAILKDPNLGKPDEIRVEMARELKANAEQRKNMTSNIASATRDHEKYREILKKEFGLKRVTKNDLLRYKLWLETDGISLYTGKPIEASKLFSKEYDIEHIIPKTRLFDDSFSNKTICERQLNIDKANVTAFSFLQNKLSGDEFEQYQSRVKSLFGKLSKAKIQKLLMANDKIPEDFIARQLQETRYISKKAKEILFEITRRVSVTTGTITDKLREDWGLVEIMKELNWEKYDKLGLTYTIEGKHGERLNKIKDWSKRNDHRHHAMDALTVALTKPAYIQYLNNLNAKELNGKKSTEIFAIEQKYLKRENGKLCFIPPVENIRTEAKKHLSKVLISYKAKNKVVTINKNRTNKKAGFNEQIALTPRGQLHKETVYGKAFHYSTKFEKIGASFDVQKINAVAKKEEREALLKRLAENGDDPKKAFTGKNSLSKMPIYLDLKRNIKLPEKVKTVVLEQNYTIRKNIDPDLKLDKVIDVGVKRILENRLKEFGGNAKLALSNLDENPIWLNKEKGITIKRVKISGVSNVESLHVKKDHFGEPILDQVGNEIPVDFVSTGNNHHVAIYEDEKGNLQEEVVSFFEAVVRQNQGLPIINKNHSLGWKFLFTLKQNEYFVFPSDDFDPTDVDLMDEENYHLISPNLFRVQKFTTKDYFFRHHLETTVEDKSELKGVSFKRLGLPGLNCIKKIRINHLGKIIQVGEY

SEQ ID NO: 525 - protein, 1091 aa, Mobiluncus mulieris
MDSRKYRVGIDVGTNSVGFAAVEEDDSGSPTRFLNTMVVIHDSGVDSEQKKYAITRLASAGTARRTRRLYRTRRQRLRELDDFISNELGYPLVNLENFADPYEPWKVRADLATTKLPNDELPEAMSIALRHMARHRGWRSPYQRVEALHLHAEISKEFAALKERVVEKTGDVFSDDATPAEVLVDLMGRQKVRGADGVLSGKLRQSDNANELRKIASVQGIDDETLNRIIDRVFSSKSPKGKASERVGMDALPGQGSKPRALKAMPSFQKFRVVSVICNLRIKDSGGDARPLSMEEKEKLIDYLMSSTTDDHVTWTDVADLLHVKRSQLQGTAKEGFDGERPYTRPPVNSTWSKIKDSKIKSLVALWKTGDVDVQSAIVEALSNASVLEDSRPGADIVVAYLESLDDKELESLDKVGLPAGRASYSEDSLERLTERMLRDDCDLFEARKREFNVADDWKPPADPIYAPVGNPGVDRVLKIVNRLLMAAEREWGAPTQINIEHVRSGFSSELMQREFERENERRRAQNEEAVKAILTEKGGNSRVSKYDITRYYAVKRQHCQCLYCGTPITFSDCELDHIVPRKGVGSTNTRVNLAAACRSCNRDKSNLPFAVWAGKASNFDVSIDDAVSRVKQWQRSQNEGVREFRAFQNEVISRLLKTTEDPEIDSRSLESVAWMARELHHRVEYYFQSKGAQTQVSVYRGAVTAQARKSSGLEDKVKMIGGGGKTRLDRRHHAMDAATIALMTPGISTTLSEKNNLRDAQKFTGQSETWKDYCGRTETARKHFAVWKSNMERLTDLFNDKLENDAIPVVQPLRLRLSNSKAHDDGIGKLDSKKLGSVWSLADIDRAATPQIWTALTRCDDFDPTKGLPENANRVIRAQGVKYESEDNIPVFPSNVAAIAVRDGYAEIGSTIHHARIYRIDDGKKTFYSMIRVFAVDLLKHQAEDLFTVKLPPSAISIRTCEDSLRRALSNGTAEYLGWLVPGDEIIVDTSDKAFHTGQIGDLLRNFPVNSFRLTGFPSNSRLRLKPVLLAGEGLRDDAEDSIKKILLGQGWRPAINVLFSKGKPRIVRRNSLGIERPSSNNGLPFSWEA

SEQ ID NO: 526 - protein, 1233 aa, Mycoplasma canis
MEKKRKVTLGFDLGIASIGWAIVDSETNQVYKLGSRLFDAPDTNLERRTQRGTRRLLRRRKYRNQKFYNLVKRTEVFGLSSREAIENRFRELSIKYPNIIELKTKALSQEVCPDEIAWILHDYLKNRGYFYDEKETKEDFDQQTVESMPSYKLNEFYKKYGYFKGALSQPTESEMKDNKDLKEAFFFDFSNKEWLKEINYFFNVQKNILSETFIEEFKKIFSFTRDISKGPGSDNMPSPYGIFGEFGDNGQGGRYEHIWDKNIGKCSIFTNEQRAPKYLPSALIFNFLNELANIRLYSTDKKNIQPLWKLSSIDKLNILLNLFNLPISEKKKKLTNANINDIVKKESTKSIMLSVEDIDMIKDEWAGKEPNVYGVGLSGLNIEESAKENKFKFQDLKILNVLINLLDNVGIKFEFKDRNDIIKNLELLDNLYLFLIYQKESNNKDSSIDLFIAKNELLNIENLKLKLKEFLLGAGNEFENHNSKTHSLSKKAIDAILPKLLDNNEGWNLEAIKNYDEEIKSQIEDNSSLMAKQDKKYLNDNFLKDAILPPNVKVTFQQAILIFNKIIQKFSKDFEIDKVVIELAREMTQDQENDALKGIAKAQKSKKSLVEERLEANNIDKSVFNDKYEKLIYKIFLWISQDFKDPYTGAQISTNEIVNNKVEIDHIIPYSLCFDDSSANKVLVHKQSNQEKSNSLPYEYIKQGHSGWNWDEFTKYVKRVFVNNVDSILSKKERLKKSENLLTTSYDGYDKLGFLARNLNDTRYATILFRDQLNNYAEHHLIDNKKMFKVIAMNGAVTSFIRKNMSYDNKLRLKDRSDFSHHAYDAAIIALFSNKTKTLYNLIDPSLNGIISKRSEGYWVIEDRYTGEIKELKKEDWTSIKNNVQARKIAKEIEEYLIDLDDEVFFSRKTKRKTNRQLYNETIYGIAAKTDEDGITNYYKKEKFSILDDKDIYLRLLREREKFVINQSNPEVIDQIIEIIESYGKENNIPSRDEAINIKYTKNKINYNLYLKQYMRSLTKSLDQFSEEFINQMIANKTFVLYNPTKNTTRKIKFLRLVNDVKINDIRKNQVINKFNGKNNEPKAFYENINSLGAIVFKNSANNFKTLSINTQIAIFGDKNWDIEDFKTYNMEKIEKYKEIYGIDKTYNFHSFIFPGTILLDKQNKEFYYISSIQTVRDIIEIKFLNKIEFKDENKNPDTSKTPKRLMFGIKSIMNNYEQVDISPFGINKKIFE

SEQ ID NO: 527 - protein, 1233 aa, Mycoplasma canis
MEKKRKVTLGFDLGIASVGWAIVDSETNQVYKLGSRLFDAPDTNLERRTQRGTRRLLRRRKYRNQKFYNLVKRTEVFGLSSREAIENRFRELSIKYPNIIELKTKALSQEVCPDEIAWILHDYLKNRGYFYDEKETKEDFDQQTIESMPSYKLNEFYKKYGYFKGALSQPTESEMKDNKDLKEAFFFDFSNKEWLKEINYFFNVQKNILSETFIEEFKKIFSFTRDISKGPGSDNMPSPYGIFGEFGDNGQGGRYEHIWDKNIGKCSIFTNEQRAPKYLPSALIFNFLNELANIRLYSTDKKNIQPLWKLSSIDKLNILLNLFNLPISEKKKKLTSANINDIVKKESTKSIMLSVEDIDMIKDEWAGKEPNVYGVGLSGLNIEESAKENKFKFQDLKILNVLINLLDNVGIKFEFKDRNDIIKNLELLDNLYLFLIYQKESNNKDSSIDLFIAKNESLNIENLKLKLKEFLLGAGNEFENHNSKTHSLSKKAIDAILPKLLDNNEGWNLEAIKNYDEEIKSQIEDNSFLMAKQDKKYLNDNFLKDAILPPNVKVTFQQAILIFNKIIQKFSKDFEIDKVVIELAREMTQDQENDALKGIAKAQKSKKSLVEERLEANNIDKSVFNEKYEKLIYKIFLWISQDFKDPYTGAKISANEIVDNKVEIDHIIPYSLCFDDSSANKVLVHKQSNQEKSNSLPYEYIKQGHSGWNWDEFTKYVKRVFVNNVDSILSKKERLKKSENLLTTSYDGYDKLGFLARNLNDTRYATILFRDQLNNYAEHHLIDDKKMFKVIAMNGAVTSFIRKNMSYDNKLRLKNRNDFSHHAYDAAIIALFSNKTKTLYNLIDPSLNGIISKRSEGYWVIEDRYTGEIKELKKEDWTSIKNNVQARKIAKEIEEYLIDLDDEVFFSRKTKRKTNRQLYNETIYGIAAKTDEDGITNYYKKEKLSILDDKDIYLRLLREREKFVINQSNPEVIDQIIEIIESYGKENNIPSRDEAINIKYTKNKINYNLYLKQYMRSLTKSLDQFSEEFINQMIANKTFVLYNPTKNTTRKIKFLRLVNDVKINDIRKNQVINKFNGKNNEPKAFYENINSLGAIVFKNSANNFKTLSINTQIAIFGDKNWDIEDFKTYNMEKIEKYKEIYGIDKTYNFHSFIFPGTILLDKQNKEFYYISSIQTVRDIIEIKFLNKIEFKDENKNQDTSKTPKRLMFGIKSIMNNYEQVDISPFGINKKIFE

SEQ ID NO: 528 - protein, 1233 aa, Mycoplasma canis; identical to SEQ ID NO: 242

SEQ ID NO: 529 - protein, 1233 aa, Mycoplasma canis
MEKKRKVTLGFDLGIASVGWAIVDSETNQVYKLGSRLFDAPDTNLERRTQRGTRRLLRRRKYRNQKFYNLVKRTEVFGLSSREAIENRFRELSIKYPNIIELKTKALSQEVCPDEIAWILHDYLKNRGYFYDEKETKEDFDQQTVESMPSYKLNEFYKKYGYFKGALSQPTESEMKDNKDLKEAFFFDFSNKEWLKEINYFFNVQKNILSETFIEEFKKIFSFTRDISKGPGSDNMPSPYGIFGEFGDNGQGGRYEHIWDKNIGKCSIFTNEQRAPKYLPSALIFNFLNELANIRLYSTDKKNIQPLWKLSSVDKLNILLNLFNLPISEKKKKLTSTNINDIVKKESIKSIMISVEDIDMIKDEWAGKEPNVYGVGLSGLNIEENAKENKFKFQDLKILNVLINLLDNVGIKFEFKDRNDIIKNLELLDNLYLFLIYQKESNNKDSSIDLFIAKNKSLNIENLKLKLKEFLLGAGNEFENHNSKSHSLSKKAIDAILPKLLDNNEGWNLEAIKNYDEEIKSQIEDNSSLMAKQDKKYLNDNFLKDAILPPNVKVTFQQAILIFNKIIQKFSKDFEIDKVVIELAREMTQDQENDALKGMAKAQKSKKSLVEERLEANNIDKSVFNDKYEKLIYKIFLWISQDFKDPYTGAQISVNEIVNNKVEIDHIIPYSLCFDDSSANKVLVHKQSNQEKSNSLPYEYIKQGHSGWNWDEFTKYVKRVFVNNVDSILSKKERLKKSENLLTTSYDGYDKLGFLARNLNDTRYATILFRDQLNNYAEHHLIDNKKMFKVIAMNGAVTSFIRKNMSYDNKLRLKDRSDFSHHAYDAAIIALFSNKTKTLYNLIDPSLNGIISKRSEGYWVIEDRYTGEIKELKKEDWTSIKNNVQARKIAKEIEEYLIDLDDEVFFSRKTKRKTNRQLYNETIYGIAAKTDEDGITNYYKKEKFSILDDKDIYLRLLREREKFVINQSNPEVIDQIIEIIESYGKENNIPSRDEAINIKYTKNKINYNLYLKQYMRSLTKSLDKFSEEFINQMIANKTFVLYNPTKNTTRKIKFLRLVNDVKINDIRKNQVINKFNGKNNEPKAFYENINSLGAIVFKNSANNFKTLSINTQIAIFGDKNWDIEDFKTYNMEKIEKYKEIYGIDKTYNFHSFIFPGTILLDKQNKEFYYISSIQTVRDIIEIKFLNKIEFKDENKNQDTSKTPKRLMFGIKSIMNNYEQVDISPFGINKKIFE

SEQ ID NO: 530 - protein, 1233 aa, Mycoplasma canis
MEKKRKVTLGFDLGIASVGWAIVDSETNQVYKLGSRLFDAPDTNLERRTQRGTRRLLRRRKYRNQKFYNLVKRTEVFGLSSREAIENRFRELSIKYPNIIELKTKALSQEVCPDEIAWILHDYLKNRGYFYDEKETKEDFDQQTVESMPSYKLNEFYKKYGYFKGALSQPTESEMKDNKDLKEAFFFDFSNKEWLKEINYFFNVQKNILSETFIEEFKKIFSFTRDISKGPGSDNMPSPYGIFGEFGDNGQGGRYEHIWDKNIGKCSIFTNEQRAPKYLPSALIFNFLNELANIRLYSTDKKNIQPLWKLSSVDKLNILLNLFNLPISEKKKKLTSTNINDIVKKESIKSIMLSVEDIDMIKYEWAGKEPNVYGVGLSGLNIEESAKENKFKFQDLKILNVLINLLDNVGIKFEFKDRNDIIKNLELLDNLYLFLIYQKESNNKDSSIDLFIAKNKSLNIENLKLKLKEFLLGAGNEFENHNSKTHSLSKKAIDAILPKLLDNNEGWNLEAIKNYDEEIKSQIEDNSSLMAKQDKKYLNDNFLKDAILPPNVKVTFQQAILIFNKIIQKFSKDFEIDKVVIELAREMTQDQENDALKGIAKAQKSKKSLVEERLEANNIDKSVFDDKYEKLIYKIFLWISQDFKDPYTGAKISANEIVNNKVEIDHIIPYSLCFDDSSANKVLVHKQSNQEKSNSLPYEYIKQGHSGWNWDEFTKYVKRVFVNNVDSILSKKERLKKSENLLTTSYDGYDKLGFLARNLNDTRYATILFRDQLNNYAEHHLIDNKKMFKVIAMNGAVTSFIRKNMSYDNKLRLKDRSDFSHHAYDAAIIALFSNKTKTLYNLIDPSLNGIISKRSEGYWVIEDRYTGEIKELKKEDWTSIKNNVQARKIAKEIEEYLIDLDDEVFFSRKTKRKTNRQLYNETIYGIAAKTDEDGITNYYKKEKFSILDDKDIYLRLLREREKFVINQSNPEVIDQIIEIIESYGKENNIPSRDEAINIKYTKNKINYNLYLKQYMRSLTKSLDQFSEEFINQMIANKTFVLYNPTKNTTRKIKFLRLVNDVKINDIRKNQVINKFNGKNNEPKAFYENINSLGAIVFKNSANNFKTLSINTQIAIFGDKNWDIEDFKTYNMEKIEKYKEIYGIDKTYNFHSFIFPGTILLDKQNKEFYYISSIQTVRDIIEIKFLNKIEFKDENKNQDTSKTPKRLMFGIKSIMNNYEQVDISPFGINKKIFE

SEQ ID NO: 531 - protein, 1239 aa, Mycoplasma cynos
MEEKRKVTLGFDLGVASVGWAIVDSETNEVYKLGSRLFDIPDTNIDRRAKRGSRRLVRRRSYRNQKFYNLIKRTKTFGFLDKEAIEKEFVLLSIKYPNIIELKVKGLQEEVSKSEAVWILHDYLKNRGYFYDDKEEKDDLENPSIESMPSYKLYEFYKEYGYFKGALSSPTESEKNKDSDLEKAIFFNFSNKEWTKEINHFFKIQKNIFSEDFKAKFMEFFSFIRDISKGPGSENMPSQYSIFGKYGDDGMGGKYQHIWDKNIGKCSIFKDKVRAPKYLPSALFFNLLNELSNIRLYSVDKREKSVLWRLSSKDKINIILNILQIILFKNDGKISNLDINKIVKNESIKSIILNEIDLDLIKDMWFEKEPNVYGIGLSGLNIEENKKENRFKFQDLKIFSVFIDLLKKSNINIEFNNEKDIIHNLKLLDELYFFLITQKYSRDKYGSIKKFILNNKSFNIDNLDEKLNIFLSISDDEFDNHNSKTHSLSKEAIYFIFPKLLHNNEGWNLEAIKNYDIDVREEISKHSFGIKKQDKKYLDDAFLDDAILPPSVKVTIKQSILIFNKIIKKFSNKFQIDNVVIELAREMTQEKEMDAQKSLNRLKKSRKKIIEERLNANNIDSKMFRDKTGEISPNYIYKIYLWISQNFKDPYTGENISANDILKNNVEIDHIIPYSLCFDDSSSNKVLVFKHSNQSKGNFLPFDMISTFSENSVWNWKEYTQYVEKTFKTNLESILDKKERVKKADNLLTSSYDGYDKLGFLARNLNDTRYATILFRDQLINYSENHLIDSKKMFKVIAMNGGVTSFIRKNMSFDSGLKVKDRSIFSHHAYDAAIIALFSNKTKILYNLINPSLDGIISKRSEGYWVLEDRLTGEIRKLNYNDWQSIKNNVEVKKIAREIESHLSNLDNVVMFSRKSKRKTNKELYNETLYGIATRIDENGIKNYYKKEKFNILEDENIYLRLLNERENFIINRSNPEVIDAIIEIFETIDKNKIPARDVAKNIKYTDNKIKYNLYLKDYMRKLVDEFPDKFRKDFIEQMIAKKIFILFNPIKNTTRKIKSLRSINNNKIEDIRKKQVLEKFNTAKNEPRSFYESLNSLGAIIFKNNLNIYKKMSISSQIATFGDKNWKIDDINTYNKEKLNKYKEIYGIDETYDFYSFIFPGTILLDEKNKEFLYISSIQTLKDKIELKFLDRIEFEKKNVNSNLKPKIKREIISTKKLMSDYKIIKISPLGINKKIFE

SEQ ID NO: 532 - protein, 1269 aa, Mycoplasma gallisepticum
MNNSIKSKPEVTIGLDLGVGSVGWAIVDNETNIIHHLGSRLFSQAKTAEDRRSFRGARRLIRRRKYKLKRFINLIWKYNSYFGFKNKEDILNNYQEQQKLHNTVLNLKLEALNAKIDPKALSWILHDYLKNRGHFYEDNRDFNVYPTEELANYFGEYGYYKGIIDSKEDNDDKLEEGLTKYKFSNQHWLEEIKKVLSNQTGLPEKFKEEYESLFSYVRNYSEGPGSINSVSPYGIYHLDEKEGKVVQKYNNIWDKTIGKCSIFPDEYRAPKNSPIAMIFNEINELSTIRSYSIYLTGWFINQEFKKAYLNKLLDLLIKTNSEKPIDARQFKKLREETIAESIGKETLKDVEREEKLEKEDHKWKLKGLKLNTNGKIQYNDLSSLAKFVHKLKQHLKLDFLLEDQYTTLDKINFLQSLFVYLGKHLRYSNRVDSANLKEFSDSNKLFERVLQEQKDDLFKLFEQTDKDDEKILAQTHSLSTKAMLLAITRMTNLDNDEDNQKNNDKGWNFEAIKNFDQKFIDITKKNNNLSLKQDKRYLDDRFINDAILSPGVKRILREATKVFNAILKQFSEEYDVTKVVIELARELSEEKELENTKNYEKLIKKNSDKISERLEALDIAEDKIEDILKSPTKSYKVLLWLQQDHIDPYSQKEIAFEDILTKTEKTEIDHIIPYSISFDDSSSNKLLVLAESNQAKSNQTPYEFITSGNAGIKWEDYEAYCRKFKDGDTSLLDSTQRSKKFAKMMKTDTSSKYDIGFLARNLNDTRYATIVFRDALKDYANNHLVEDKPMFKVVCINGGVTSFLRKNFDKSWYAKKDRDKNIHHAVDASIISIFSNETKTLFNQLTQFADYKLFKNTDGSWKKIDPKTGVVTEVTDENWKQIRVRNQVSEIAKVINKCIQDSNIERKARYSRKIENKTNISLFNDTVYSAKKVGYEDQIKRKNLKTLDIHESAEENKNSKVKKQFVYRKLVNVSLLNNDKLADLFAEKEDILMYRANPWVINLAEQIFNEYTENKKIKSQNVFEKYMLDLTKEFPEKFSEAFVKSMLRNKTAIIYNVEKKVVHRIKRLKILSSELKENKLSNVIIRSKNESGTKLSYQDTINSIALMIMRSIDPTAKKQYIRVPLNTLNLHLGDQDFDLHNIDAYLKKPKFVKYLKANEIGDEYKPWRVLTSGTLLIHKKDKKLMYISSFQNLKDVIEIKNLIETEYKENDDSDPKKKKKANRFLMTLSTILNDYILLDAKDNFDILGLSKNRIDEILNSKLGLDKITK

SEQ ID NO: 533 - protein, 1224 aa, Mycoplasma gallisepticum
MNNSIKSKPEVTIGLDLGVGSVGWAIVDNETNIIHHLGSRLFSQAKTAEDRRSFRGARRLIRRRKYKLKRFINLIWKYNSYFGFKNKEDILNNYQEQQKLHNTVLNLKLEALNAKIDPKALSWILHDYLKNRGHFYEDNRDFNVYPTEELANYFGEYGYYKGIIDSKEDNDDKLEEGLTKYKFSNQHWLEEIKKVLSNQTGLPEKFKEEYESLFSYVRNYSEGPGSINSVSPYGIYHLDEKEGKVVQKYNNIWDKTIGKCSIFPDEYRAPKNSPIAMIFNEINELSTIRSYSIYLTGWFINQEFKKAYLNKLLDLLIKTNSEKPIDARQFKKLREETIAESIGKETLKDVEREEKLEKEDHKWKLKGLKLNTNGKIQYNDLSSLAKFVHKLKQHLKLDFLLEDQYTTLDKINFLQSLFVYLGKHLRYSNRVDSANLKEFSDSNKLFERVLQEQKDDLFKLFEQTDKDDEKILAQTHSLSTKAMLLAITRMTNLDNDEDNQKNNDKGWNFEAIKNFDQKFIDITKKNNNLSLKQDKRYLDDRFINDAILSPGVKRILREATKVFNAILKQFSEEYDVTKVVIELARELSEEKELENTKNYEKLIKKNSDKISERLEALDIAEDKIEDILKSPTKSYKVLLWLQQDHIDPYSQKEIAFEDILTKTEKTEIDHIIPYSISFDDSSSNKLLVLAESNQAKSNQTPYEFITSGNAGIKWEDYEAYCRKFKDGDTSLLDSTQRSKKFAKMMKTDTSSKYDIGFLARNLNDTRYATIVFRDALKDYANNHLVEDKPMFKVVCINGGVTSFLRKNFDKSWYAKKDRDKNIHHAVDASIISIFSNETKTLFNQLTQFADYKLFKNTDGSWKKIDPKTGVVTEVTDENWKQIRVRNQVSEIAKVINKCIQDSNIERKARYSRKIENKTNISLFNDTVYSAKKVGYEDQIKRKNLKTLDIHESAEENKNSKVKKQFVYRKLVNVSLLNNDKLADLFAEKEDILMYRANPWVINLAEQIFNEYTENKKIKSQNVFEKYMLDLTKEFPEKFSEAFVKSMLRNKTAIIYNVEKKVVHRIKRLKILSSELKENKLSNVIIRSKNESGTKLSYQDTINSIALMIMRSIDPTAKKQYIRVPLNTLNLHLGDQDFDLHNIDAYLKKPKFVKYLKANEIGDEYKPWRVLTSGTLLIHKKDKKLMYISSFQNLKDVIEIKNLIETEYKENDDSDPKKRRKQIGS

SEQ ID NO: 534 - protein, 1269 aa, Mycoplasma gallisepticum; identical to SEQ ID NO: 133

SEQ ID NO: 535 - protein, 226 aa, Mycoplasma iowae
MSNKKKITIGLDIGVSSVGWSILREDNVLIDYGSRLFPDAANAKDGKLENEARRSHRSMRRRIRRIKTRKNDLIKLLIKYNIISDQDELAKILEQGIVNETGNVPIVEIKYKGLKEKLSKEELLICLYHYIHKRGYFYITEEDLKENGENINRLPTEIQYDFYMKNGYYIGNEDNQKFSNLIWVKEIEKFLSKQSLDSNFVDEYISLFRRVRDYSDGPGSEKSPTP

SEQ ID NO: 536 - protein, 1304 aa, Mycoplasma synoviae
MLNNVQNLWKYLLLLIFDKKIIFLFKIKVILIRRYMENNNKEKIVIGFDLGVASVGWSIVNAETKEVIDLGVRLFSEPEKADYRRAKRTTRRLLRRKKFKREKFHKLILKNAEIFGLQSRNEILNVYKDQSSKYRNILKLKINALKEEIKPSELVWILRDYLQNRGYFYKNEKLTDEFVSNSFPSKKLHEHYEKYGFFRGSVKLDNKLDNKKDKAKEKDEEEESDAKKESEELIFSNKQWINEIVKVFENQSYLTESFKEEYLKLFNYVRPFNKGPGSKNSRTAYGVFSTDIDPETNKFKDYSNIWDKTIGKCSLFEEEIRAPKNLPSALIFNLQNEICTIKNEFTEFKNWWLNAEQKSEILKFVFTELFNWKDKKYSDKKFNKNLQDKIKKYLLNFALENFNLNEEILKNRDLENDTVLGLKGVKYYEKSNATADAALEFSSLKPLYVFIKFLKEKKLDLNYLLGLENTEILYFLDSIYLAISYSSDLKERNEWFKKLLKELYPKIKNNNLEIIENVEDIFEITDQEKFESFSKTHSLSREAFNHIIPLLLSNNEGKNYESLKHSNEELKKRTEKAELKAQQNQKYLKDNFLKEALVPLSVKTSVLQAIKIFNQIIKNFGKKYEISQVVIEMARELTKPNLEKLLNNATNSNIKILKEKLDQTEKFDDFTKKKFIDKIENSVVFRNKLFLWFEQDRKDPYTQLDIKINEIEDETEIDHVIPYSKSADDSWFNKLLVKKSTNQLKKNKTVWEYYQNESDPEAKWNKFVAWAKRIYLVQKSDKESKDNSEKNSIFKNKKPNLKFKNITKKLFDPYKDLGFLARNLNDTRYATKVFRDQLNNYSKHHSKDDENKLFKVVCMNGSITSFLRKSMWRKNEEQVYRFNFWKKDRDQFFHHAVDASIIAIFSLLTKTLYNKLRVYESYDVQRREDGVYLINKETGEVKKADKDYWKDQHNFLKIRENAIEIKNVLNNVDFQNQVRYSRKANTKLNTQLFNETLYGVKEFENNFYKLEKVNLFSRKDLRKFILEDLNEESEKNKKNENGSRKRILTEKYIVDEILQILENEEFKDSKSDINALNKYMDSLPSKFSEFFSQDFINKCKKENSLILTFDAIKHNDPKKVIKIKNLKFFREDATLKNKQAVHKDSKNQIKSFYESYKCVGFIWLKNKNDLEESIFVPINSRVIHFGDKDKDIFDFDSYNKEKLLNEINLKRPENKKFNSINEIEFVKFVKPGALLLNFENQQIYYISTLESSSLRAKIKLLNKMDKGKAVSMKKITNPDEYKIIEHVNPLGINLNWTKKLENNN

SEQ ID NO: 537 - protein, 1401 aa, Myroides injenensis
MKRILGLDLGTTSIGWAYVHEAENVNETSSIQKVGVRVNPLTTEEQTNFEKGKPITTNASRTLARSARRNLQRYKLRRDNLIQILKENNWINNTTSLTETGNHSTFETYELRNKAASEKLTLDQLSRVLLMLNKKRGYKSSRKVNSKEEGQLIDGMEVAKKLYHEQLTPGQLSLQLMNQGVKKLPDYYRSDLNQELESIWNFQQQFYPNILTDKFKEEINGKGLTSTSSAFWNIYNFNTAENKGSRDEKKKQALQWRSEALSKQLSKEIVAYIIADLNGQIYNSSGYLGAISDRSKELYFNNLTVGQYLFKQLKSNPHTSLKNQVFYRQDYLNEFEKIWETQSKFYPKELTAALKREIRDVIIFYQRKLKSQKGLISFCEFEQKQKTINGKTKTIGHRVIPKSSPLFQEFKIWQQLHNVVLRNKKTNEIVSLADEQKVHLFEELNLKGKLKSNQVLKLIENKPKDWELNYTELEGNNTNKALYNAYLDILDIEGYDVRNELKVKLNKDDIELSDLDVNASEIKEMIFSVFKHLGINTEILEFDATLEDKVFEKQASYQLWHLLYSYEEDNSPTGLDRLYNLLHKKFGFKLNHAKLIGNVLFQDDYGSLSSKAIKNIFPYITENNYYTACELAGYKHSKHSLTKEENETRELKNRLTILPKNSLRNPVVEKIINQMINVVNTLIDEENNILIAQGKEPNFQFDEIRIELARELKKNAKEREELTKSINKSKTDHEKIIKILQKEDGIKNPTRNDIVRFKLYSELKNNGYKDLYTNEYIERKDIFTKEYDIEHIIPQSKLFDDSFSNKTLVRRNVNLKKGNQTAYDFILCEYGQEKANEFETRITNLYNLGKDEGISKSKFKKLLMQESEIGNGFIERDLRETQYIAKKAKSLLLEITRNVISTSGSITDRLREDWGLINVMKELNLQKYRDAGLTEFVKMKDGNKKEVIIDWTKRNDHRHHAMDALTIAFTKHNHIQYLNHLNARKNVNNELHNNIIAIEKLETTLVSDERGNKKRIFKEPIANFRTIAKSHLEAILVSHKAKNKVVTKNINKISGKKISQQTLTPRGQLHKETIYGKIRQYVSKQEKVGPKFTIEVIEQVSNPTYRNLLLKRLEENNNDPKKAFGGKNSLNKNPIYINLEKNIKVPEVLKLVWLEDNYTIRKEISPDLKIDKVIDQGVKQILQNRLAQYKGDSKLAFSNLDANPIWLNEDKGIAIKRVTISGIATAQPLHRKKDHLGQPILDHNGQEIPVDFISTGNNHHVAIYEDENGKLQESVVSHFEAVERVNQKLPIIDKTFNQHLGWKFLFTMKQNELFLFPSDDFNPNEIDLFDKQNYTVISKHLFRIQKLSTKDYSFRHHLETNVEEIKDLKTITWRREGLNGIQNIIKVRTNHLGEIIHIGEY

SEQ ID NO: 538 - protein, 1466 aa, Myroides odoratus
MKNILGLDLGTNSIGWALVKEDFENKQGEILGLGSRIIPMSQDILGEFGRGNSISQTADRTGYRGVRRLRERHLLRRERLHRVLNILGFLPNHYAKEIDFTKRLGKFINHAEPKLSFDKEFIFKDSFNEMLKDFQQNQPGFIINKHGEEALVPYDWTIYYLRKKALTQKIDKEELAWILLNFNQKRGYYQLRGEEEEENTNKLVEFYSLKIIDVIADNEVNKKGEVWYSLHLENGWIYRRSSKISLVDWKDKVRDFIVTTDVNDDGSEKLDKDGVVKRSFRAPSADDWTLLKKKTEQDIDNSNKTVGAYIYENLLLNPKQKIKGKLVRTIERKFYKDELKQILEKQKEFHQELQNEQLLQDCVRELYKYNEQHQQMLESKDFVHLFLNDIIFYQRPLRSQKSLISNCTLEKRVSRDGVVFPIKVISKSNPYYQEFRLLQWLQNLAIYRKDDDVNVTQEFLNSIESWENLLQFLNAKKEIKQEQLIKFLLEQKGLKGNSLKTAILTYRWNYVTDKVYPMNETRSLIQDKLKKVENVATDFLSFDNEMALWHIIYSVNDKIEYEKALAKFASKHNLDEISFVESFKKFPPFKSDYGSFSEKAIKKLLPLMRFGSVWNKNNIVPSVLDRIDKILTGEYDEKIKIRVREKAEQFQLNQIEDFQNLPLWLAQYVVYDRHSEAEIAGKWNSVKDLENYLKEFKQHSLRNPIVEQIITETLRVVKDIWQQYGNGVQNFFDEIHIELGREMKNTADERKRITNSVTENENTNLRIKALLVELKEDTNIENVRPHSPMQQEILKIYEEGVLNAVENIDEDILKISKTAQPSKSELIRYKLWLEQKYQSPYTGEMIPLSRLFTSDYEIEHVIPQSRYFDDSLSNKVICEAAVNKRKDNQLGLEFIKNHHSEKIELGNGRTAQVLEVEAYESFVKKNYDKNRGKRNKLLLEDVPEKMIERQLNDTRYISKFVTHLLSNIVRKDEVNSKDDGINSKNIIPGNGKITSQLKQDWGLNDVWNELILPRFERMNNLTNSTDFTSTNTNGKIIPTVPLEYSKGFSKKRIDHRHHALDALVIALATRDHVNLLNNESALPKKDRTKEEQKSFRFDLQVNLRNKEKYFNVKEGREKEKFTTFKKPWNTLTQDTRDALENMVVSFKQNLRVINKATNYYESYTDENGNLRLDKYGNPKKELISQKGTNWAIRKSLHKETVSGQIHLDRVKVTKGKIVTATRKSLDSSFNEKSIESITDTGIQKILRNYLKAKDNKPDVAFSPEGIEELNKSISVYNEGKNHQPIIKVRIFEQGSKFPVGETGNKIAKFVEAAKGTNLFFGIYQDKTGKRSYDTIPLNLVIERLKQGLSPVPETNEKGHQLLFHLSPNDLVYVPTIDDNEQLDSNRVYKFTDSSDTTCNFIPSNISAIIFNINSKEQEKRGINYPIQNELGVGSPQSKNQKSFDGFMIKEVCIKLKVDRLGNISKT

SEQ ID NO: 539 - protein, 241 aa, Neisseria lactamica
MAAFKPNPMNYILGLDIGIASVGWAMVEIDKEENPIRLIDLGVRVFERAEMPKTGDSLAMARRLARSVRRLTRRRAHRLLRARRLLKREGVLQDADFDENGLVKSLPNTPWQLRAAALDRKLTCLEWSAVLLHLIKHRGYLSQRKNEGETADKELGALLKGVADNAHALQTGDFRTPAELALNKFEKESGHIRNQRGDYSHTFSRKDLQAELNLLFEKQKEFGNPHVSDGLKEGIETLLMA

SEQ ID NO: 540 - protein, 666 aa, Neisseria lactamica
MAAFKPNPMNYILGLDIGIASVGWAMVEVDEEENPIRLIDLGVRVFERAEVPKTGDSLAMARRLARSVRRLTRRRAHRLLRARRLLKREGVLQDADFDENGLVKSLPNTPWQLRAAALDRKLTCLEWSAVLLHLVKHRGYLSQRKNEGETADKELGALLKGVADNAHALQTGDFRTPAELALNKFEKESGHIRNQRGDYSHTFSRKDLQAELNLLFEKQKEFGNPHVSDGLKEDIETLLMAQRPALSGDAVQKMLGHCTFEPAEPKAAKNTYTAERFIWLTKLNNLRILEQGSERPLTDTERATLMDEPYRKSKLTYAQARKLLGLEDTAFFKGLRYGKDNAEASTLMEMKAYHAISRALEKEGLKDKKSPLNLSTELQDEIGTAFSLFKTDKDITGRLKDRVQPEILEALLKHISFDKFVQISLKALRRIVPLMEQGKRYDEACAEIYGDHYCKKNAEEKIYLPPIPADEIRNPVVLRALSQARKVINCVVRRYGSPARIHIETAREVGKSFKDRKEIEKRQEENRKDREKAAAKFREYFPNFVGEPKSKDILKLRLYEQQHGKCLYSGKEINLVRLNEKGYVEIDHALPFSRTWDDSFNNKVLVLGSENQNKGNQTPYEYFNGKDNSREWQEFKARVETSRFPRSKNNGFCCKNSMKKDLKNAT

SEQ ID NO: 541 - protein, 828 aa, Neisseria lactamica
MLGHCTFEPAEPKAAKNTYTAERFIWLTKLNNLRILEQGSERPLTDTERATLMDEPYRKSKLTYAQARKLLGLEDTAFFKGLRYGKDNAEASTLMEMKAYHAISRALEKEGLKDKKSPLNLSTELQDEIGTAFSLFKTDKDITGRLKDRVQPEILEALLKHISFDKFVQISLKALRRIVPLMEQGKRYDEACAEIYGDHYGKKNTEEKIYLPPIPADEIRNPVVLRALSQARKVINAVVRRYDSPARIHIETAREVGKSFKDRKEIEKRQEENRKDREKAAAKFREYFPNFVGEPKSKDILKLRLYEQQHGKCLYSGKEINLVRLNEKGYVEIDHALPFSRTWDDSFNNKVLVLGSENQNKGNQTPYEYFNGKDNSREWQEFKARVETSRFPRSKKQRILLQKFDEEGFKERNLNDTRYVNRFLCQFVADHILLTGKGKRRVFASNGQITNLLRGFWGLRKVRAENDRHHALDAVVVACSTVAMQQKITRFVRYKEMNAFDGKTIDKETGEVLHQKAHFPQPWEFFAQEVMIRVFGKPDGKPEFEEADTSEKLRTLLAEKLSSRPEAVHEYVTPLFVSRAPNRKMSGQGHMETVKSAKRLDEGISVLRVPLTQLKLKDLEKMVNREREPKLYDALKAQLETHKDDPAKAFAEPFYKYDKAGSRTQQVKAVRIEQVQKTGVWVRNHNGIADNATMVRVDVFEKGGKYYLVPIYSWQVAKGILPDRAVVAFKDEEDWTVMDDSFEFRFVLYANDLIKAELKKETFFGYFSGLDRSTGNISLRSHDLDKTKGKDGVYRIGIKTALSFQKHQIDELGKEIRPCRLKKRPPVR

SEQ ID NO: 542 - protein, 408 aa, Neisseria lactamica
MNDTRYVNRFLCQFVADHILLTGKGKRRVFASNGQITNLLRGFWGLRKVRTENDRHHALDAVVVACSTVAMQQKITRFVRYKEMNAFDGKTIDKETGEVLHQKAHFPQPWEFFAQEVMIRVFGKPDGKPEFEEADTPEKLRTLLAEKLSSRPEAVHEYVTPLFVSRAPNRKMSGQGHMETVKSAKRLDEGISVLRVPLTQLKLKGLEKMVNREREPKLYDALKAQLETHKDDPAKAFAEPFYKYDKAGSRTQQVKAVRIEQVQKTGVWVRNHNGIADNATMVRVDVFEKGGKYYLVPIYSWQVAKGILPDRAVVAFKDEEDWTVMDDSFEFRFVLYANDLIKLTAKKNEFLGYFVSLNRATGAIDIRTHDTDSTKGKNGIFQSVGVKTALSFQKTKSTNSAKKSDHAV

SEQ ID NO: 543 - protein, 1082 aa, Neisseria meningitidis
MAAFKPNPINYILGLDIGIASVGWAMVEIDEDENPICLIDLGVRVFERAEVPKTGDSLAAARRLARSVRRLTRRRAHRLLRARRLLKREGVLQAADFDENGLIKSLPNTPWQLRAAALDRKLTPLEWSAVLLHLIKHRGYLSQRKNEGETADKELGALLKGVADNAHALQTGDFRTPAELALNKFEKESGHIRNQRGDYSHTFSRKDLQAELILLFEKQKEFGNPHVSGGLKEGIETLLMTQRPALSGDAVQKMLGHCTFEPAEPKAAKNTYTAERFIWLTKLNNLRILEQGSERPLTDTERATLMDEPYRKSKLTYAQARKLLGLEDTAFFKGLRYGKDNAEASTLMEMKAYHAISRALEKEGLKDKKSPLNLSPELQDEIGTAFSLFKTDEDITGRLKDRVQPEILEALLKHISFDKFVQISLKALRRIVPLMEQGKRYDEACAEIYGDHYGKKNTEEKIYLPPIPADEIRNPVVLRALSQARKVINGVVRRYGSPARIHIETAREVGKSFKDRKEIEKRQEENRKDREKAAAKFREYFPNFVGEPKSKDILKLRLYEQQHGKCLYSGKEINLGRLNEKGYVEIDHALPFSRTWDDSFNNKVLVLGSENQNKGNQTPYEYFNGKDNSREWQEFKARVETSRFPRSKKQRILLQKFDEDGFKERNLNDTRYVNRFLCQFVADRMRLTGKGKKRVFASNGQITNLLRGFWGLRKVRAENDRHHALDAVVVACSTVAMQQKITRFVRYKEMNAFDGKTIDKETGEVLHQKTHFPQPWEFFAQEVMIRVFGKPDGKPEFEEADTPEKLRTLLAEKLSSRPEAVHEYVTPLFVSRAPNRKMSGQGHMETVKSAKRLDEGVSVLRVPLTQLKLKDLEKMVNREREPKLYEALKARLEAHKDDPAKAFAEPFYKYDKAGNRTQQVKAVRVEQVQKTGVWVRNHNGIADNATMVRVDVFEKGDKYYLVPIYSWQVAKGILPDRAVVQGKDEEDWQLIDDSFNFKFSLHPNDLVEVITKKARMFGYFASCHRGTGNINIRIHDLDHKIGKNGILEGIGVKTALSFQKYQIDELGKEIRPCRLKKRPPVR

SEQ ID NO: 544 - protein, 976 aa, Neisseria meningitidis
MAAFKPNPINYILGLDIGIASVGWAMVEIDEDENPICLIDLGVRVFERAEVPKTGDSLAAARRLARSVRRLTRRRAHRLLRARRLLKREGVLQAADFDENGLIKSLPNTPWQLRAAALDRKLTPLEWSAVLLHLIKHRGYLSQRKNEGETADKELGALLKGVADNAHALQTGDFRTPAELALNKFEKESGHIRNQRGDYSHTFSRKDLQAELILLFEKQKEFGNPHVSGGLKEGIETLLMTQRPALSGDAVQKMLGHCTFEPAEPKAAKNTYTAERFIWLTKLNNLRILEQGSERPLTDTERATLMDEPYRKSKLTYAQARKLLGLEDTAFFKGLRYGKDNAEASTLMEMKAYHAISRALEKEGLKDKKSPLNLSPELQDEIGTAFSLFKTDEDITGRLKDRIQPEILEALLKHISFDKFVQISLKALRRIVPLMEQGKRYDEACAEIYGDHYGKKNTEEKIYLPPIPADEIRNPVVLRALSQARKVINGVVRRYGSPARIHIETAREVGKSFKDRKEIEKRQEENRKDREKAAAKFREYFPNFVGEPKSKDILKLRLYEQQHGKCLYSGKEINLGRLNEKGYVEIDHALPFSRTWDDSFNNKVLVLGSENQNKGNQTPYEYFNGKDNSREWQEFKARVETSRFPRSKKQRILLQKFDEDGFKERNLNDTRYVNRFLCQFVADRMRLTGKGKKRVFASNGQITNLLRGFWGLRKVRAENDRHHALDAVVVACSTVAMQQKITRFVRYKEMNAFDGKTIDKETGEVLHQKTHFPQPWEFFAQEVMIRVFGKPDGKPEFEEADTPEKLRTLLAEKLSSRPEAVHEYVTPLFVSRAPNRKMSGQGHMETVKSAKRLDEGVSVLRVPLTQLKLKDLEKMVNREREPKLYEALKARLEAHKDDPAKAFAEPFYKYDKAGNRTQQVKAVRVEQVQKTGVWVRNHNGIADNATMVRVDVFEKGDKYYLVPIYSWQVAKGIFAG

SEQ ID NO: 545 - protein, 1081 aa, Neisseria meningitidis
MAAFKPNPINYILGLDIGIASVGWAMVEIDEDENPICLIDLGVRVFERAEVPKTGDSLAAARRLARSVRRLTRRRAHRLLRARRLLKREGVLQAADFDENGLIKSLPNTPWQLRSAALDRKLTPLEWSAVLLHLIKHRGYLSQRKNEGETADKELGALLKGVADNAHALQTGDFRTPAELALNKFEKESGHIRNRRGDYSHTFSRKDLQAELDLLFEKQKEFGNPHISDDLKEGIETLLMTQRPALSGDAVQKMLGHCTFEPTEPKAAKNTYTAERFVWLTKLNNLRILEQGSERPLTDTERATLMDEPYRKSKLTYAQARKLLELDDTAFFKGLRYGKDNAEASTLMEMKAYHAISRALEKEGLKDKKSPLNLSPELQDEIGTAFSLFKTDEDITGRLKDRVQPEILEVLLKHISFDKFVQISLKALRRIVPLMEQGKRYDEACAEIYGDHDGKKNTEEKIYLPPIPADEIRNPVVLRALSQARKVINAVVRRYGSPARIHIETAREVGKSFKDRKEIEKRQEENRKDREKAAAKFREYFPNFVGEPKSKDILKLRLYEQQHGKCLYSGKEINLGRLNEKGYVEIDHALPFSRTWDDSFNNKVLVLGSENQNKGNQTPYEYFNGKDNSREWQEFKARVETSRFPRSKKQRILLQKFDEEGFKERNLNDTRYVNRFLCQFVADHMLLTGKGKRRVFASNGQITNLLRGFWGLRKVRAENNRHHALDAVVVACSTVAMQQKITRFVRYKEMNAFDGKTIDKETGEVLHQKTHFPQPWEFFAQEVMIRVFGKPDGKPEFEEADTPEKLRTLLAEKLSSRPEAVHEYVTPLFVSRAPNRKMSGQGHMETVKSAKRLDEGVSVLRVPLTQLKLKDLEKMVNREREPKLYEALKARLEAHKDDPAKAFAEPFYKYDKAGNRTQQVKAVRVEQVQKTGVWVRNHNGIADNATMVRVDVFEKAGKYYLVPIYSWQVAKGILPDRAVVAYADEEGWTVIDESFRFKFVLYSNDLIKVQLKKDSFLGYFSGLDRATGAISLREHDLEKSKGKDGMHRIGVKTALSFQKYQIDEMGKEIRLCRLKKRPPVR

SEQ ID NO: 546 - protein, 1081 aa, Neisseria meningitidis
MAAFKPNPINYILGLDIGIASVGWAMVEIDEDENPICLIDLGVRVFERAEVPKTGDSLAAARRLARSVRRLTRRRAHRLLRARRLLKREGVLQAADFDENGLIKSLPNTPWQLRSAALDRKLTPLEWSAVLLHLIKHRGYLSQRKNEGETADKELGALLKGVANNAHALQTGDFRTPAELALNKFEKESGHIRNQRGDYSHTFSRKDLQAELILLFEKQKEFGNPHVSGGLKEGIETLLMTQRPALSGDAVQKMLGHCTFEPAEPKAAKNTYTAERFIWLTKLNNLRILEQGSERPLTDTERATLMDEPYRKSKLTYAQARKLLGLEDTAFFKGLRYGKDNAEASTLMEMKAYHAISRALEKEGLKDKKSPLNLSPELQDEIGTAFSLFKTDEDITGRLKDRIQPEILEALLKHISFDKFVQISLKALRRIVPLMEQGKRYDEACAEIYGDHYGKKNTEEKIYLPPIPADEIRNPVVLRALSQARKVINGVVRRYGSPARIHIETAREVGKSFKDRKEIEKRQEENRKDREKAAAKFREYFPNFVGEPKSKDILKLRLYEQQHGKCLYSGKEINLGRLNEKGYVEIDHALPFSRTWDDSFNNKVLVLGSENQNKGNQTPYEYFNGKDNSREWQEFKARVETSRFPRSKKQRILLQKFDEDGFKERNLNDTRYVNRFLCQFVADRMRLTGKGKKRVFASNGQITNLLRGFWGLRKVRAENDRHHALDAVVVACSTVAMQQKITRFVRYKEMNAFDGKTIDKETGEVLHQKTHFPQPWEFFAQEVMIRVFGKPDGKPEFEEADTPEKLRTLLAEKLSSRPEAVHEYVTPLFVSRAPNRKMSGQGHMETVKSAKRLDEGVSVLRVPLTQLKLKDLEKMVNREREPKLYEALKARLEAHKDDPAKAFAEPFYKYDKAGNRTQQVKAVRVEQVQKTGVWVRNHNGIADNATMVRVDVFEKAGKYYLVPIYSWQVAKGILPDRAVVAYADEEGWTVIDESFRFKFVLYSNDLIKVQLKKDSFLGYFSGLDRATGAISLREHDLEKSKGKDGMHRIGVKTALSFQKYQIDEMGKEIRLCRLKKRPPVR

SEQ ID NO: 547 - protein, 1082 aa, Neisseria meningitidis
MAAFKPNPINYILGLDIGIASVGWAMVEIDEDENPICLIDLGVRVFERAEVPKTGDSLAMARRLARSVRRLTRRRAHRLLRARRLLKREGVLQAADFDENGLIKSLPNTPWQLRAAALDRKLTPLEWSAVLLHLIKHRGYLSQRKNEGETADKELGALLKGVADNAHALQTGDFRTPAELALNKFEKESGHIRNQRGDYSHTFSRKDLQAELILLFEKQKEFGNPHVSGGLKEGIETLLMTQRPALSGDAVQKMLGHCTFEPAEPKAAKNTYTAERFIWLTKLNNLRILEQGSERPLTDTERATLMDEPYRKSKLTYAQARKLLGLEDTAFFKGLRYGKDNAEASTLMEMKAYHAISRALEKEGLKDKKSPLNLSPELQDEIGTAFSLFKTDEDITGRLKDRIQPEILEALLKHISFDKFVQISLKALRRIVPLMEQGKRYDEACAEIYGDHYGKKNTEEKIYLPPIPADEIRNPVVLRALSQARKVINGVVRRYGSPARIHIETAREVGKSFKDRKEIEKRQEENRKDREKAAAKFREYFPNFVGEPKSKDILKLRLYEQQHGKCLYSGKEINLGRLNEKGYVEIDHALPFSRTWDDSFNNKVLVLGSENQNKGNQTPYEYFNGKDNSREWQEFKARVETSRFPRSKKQRILLQKFDEDGFKERNLNDTRYVNRFLCQFVADRMRLTGKGKKRVFASNGQITNLLRGFWGLRKVRAENDRHHALDAVVVACSTVAMQQKITRFVRYKEMNAFDGKTIDKETGEVLHQKTHFPQPWEFFAQEVMIRVFGKPDGKPEFEEADTPEKLRTLLAEKLSSRPEAVHEYVTPLFVSRAPNRKMSGQGHMETVKSAKRLDEGVSVLRVPLTQLKLKDLEKMVNREREPKLYEALKARLEAHKDDPAKAFAEPFYKYDKAGNRTQQVKAVRVEQVQKTGVWVRNHNGIADNATMVRVDVFEKGDKYYLVPIYSWQVAKGILPDRAVVQGKDEEDWQLIDDSFNFKFSLHPNDLVEVITKKARMFGYFASCHRGTGNINIRIHDLDHKIGKNGILEGIGVKTALSFQKYQIDELGEEIRPCRLKKRPPVR

SEQ ID NO: 548 - protein, 1082 aa, Neisseria meningitidis
MAAFKPNPINYILGLDIGIASVGWAMVEIDEDENPICLIDLGVRVFERAEVPKTGDSLAMARRLARSVRRLTRRRAHRLLRARRLLKREGVLQAADFDENGLIKSLPNTPWQLRAAALDRKLTPLEWSAVLLHLIKHRGYLSQRKNEGETADKELGALLKGVADNAHALQTGDFRTPAELALNKFEKESGHIRNQRGDYSHTFSRKDLQAELILLFEKQKEFGNPHVSGGLKEGIETLLMTQRPALSSDAVQKMLGHCTFEPAEPKAAKNTYTAERFIWLTKLNNLRILEQGSERPLTDTERATLMDEPYRKSKLTYAQARKLLGLEDTAFFKGLRYGKDNAEASTLMEMKAYHAISRALEKEGLKDKKSPLNLSPELQDEIGTAFSLFKTDEDITGRLKDRIQPEILEALLKHISFDKFVQISLKALRRIVPLMEQGKRYDEACAEIYGDHYGKKNTEEKIYLPPIPADEIRNPVVLRALSQARKVINGVVRRYGSPARIHIETAREVGKSFKDRKEIEKRQEENRKDREKAAAKFREYFPNFVGEPKSKDILKLRLYEQQHGKCLYSGKEINLGRLNEKGYVEIDHALPFSRTWDDSFNNKVLVLGSENQNKGNQTPYEYFNGKDNSREWQEFKARVETSRFPRSKKQRILLQKFDEDGFKERNLNDTRYVNRFLCQFVADRMRLTGKGKKRVFASNGQITNLLRGFWGLRKVRAENDRHHALDAVVVACSTVAMQQKITRFVRYKEMNAFDGKTIDKETGEVLHQKTHFPQPWEFFAQEVMIRVFGKPDGKPEFEEADTPEKLRTLLAEKLSSRPEAVHEYVTPLFVSRAPNRKMSGQGHMETVKSAKRLDEGVSVLRVPLTQLKLKDLEKMVNREREPKLYEALKARLEAHKDDPAKAFAEPFYKYDKAGNRTQQVKAVRVEQVQKTGVWVRNHNGIADNATMVRVDVFEKGDKYYLVPIYSWQVAKGILPDRAVVQGKDEEDWQLIDDSFNFKFSLHPNDLVEVITKKARMFGYFASCHRGTGNINIRIHDLDHKIGKNGILEGIGVKTALSFQKYQIDELGKEIRPCRLKKRPPVR

SEQ ID NO: 549 - protein, 1082 aa, Neisseria meningitidis
MAAFKPNPINYILGLDIGIASVGWAMVEIDEDENPICLIDLGVRVFERAEVPKTGDSLAMARRLARSVRRLTRRRAHRLLRARRLLKREGVLQAADFDENGLIKSLPNTPWQLRAAALDRKLTPLEWSAVLLHLIKHRGYLSQRKNEGETADKELGALLKGVADNAHALQTGDFRTPAELALNKFEKESGHIRNQRGDYSHTFSRKDLQAELILLFEKQKEFGNPHVSGGLKEGIETLLMTQRPALSSDAVQKMLGHCTFEPAEPKAAKNTYTAERFIWLTKLNNLRILEQGSERPLTDTERATLMDEPYRKSKLTYAQARKLLGLEDTAFFKGLRYGKDNAEASTLMEMKAYHAISRALEKEGLKDKKSPLNLSPELQDEIGTAFSLFKTDEDITGRLKDRIQPEILEALLKHISFDKFVQISLKALRRIVPLMEQGKRYDEACAEIYGDHYGKKNTEEKIYLPPIPADEIRNPVVLRALSQARKVINGVVRRYGSPARIHIETAREVGKSFKDRKEIEKRQEENRKDREKAAAKFREYFPNFVGEPKSKDILKLRLYEQQHGKCLYSGKEINLGRLNEKGYVEIDHALPFSRTWDDSFNNKVLVLGSENQNKGNQTPYEYFNGKDNSREWQEFKARVETSRFPRSKKQRILLQKFDEDGFKERNLNDTRYVNRFLYQFVADRMRLTGKGKKRVFASNGQITNLLRGFWGLRKVRAENDRHHALDAVVVACSTVAMQQKITRFVRYKEMNAFDGKTIDKETGEVLHQKTHFPQPWEFFAQEVMIRVFGKPDGKPEFEEADTPEKLRTLLAEKLSSRPEAVHEYVTPLFVSRAPNRKMSGQGHMETVKSAKRLDEGVSVLRVPLTQLKLKDLEKMVNREREPKLYEALKARLEAHKDDPAKAFAEPFYKYDKAGNRTQQVKAVRVEQVQKTGVWVRNHNGIADNATMVRVDVFEKGDKYYLVPIYSWQVAKGILPDRAVVQGKDEEDWQLIDDSFNFKFSLHPNDLVEVITKKARMFGYFASCHRGTGNINIRIHDLDHKIGKNGILEGIGVKTALSFQKYQIDELGKEIRPCRLKKRPPVR

SEQ ID NO: 550 - protein, 1081 aa, Neisseria meningitidis
MAAFKPNPINYILGLDIGIASVGWAMVEIDEDENPICLIDLGVRVFERAEVPKTGDSLAMARRLARSVRRLTRRRAHRLLRARRLLKREGVLQAADFDENGLIKSLPNTPWQLRAAALDRKLTPLEWSAVLLHLIKHRGYLSQRKNEGETADKELGALLKGVADNAHALQTGDFRTPAKLALNKFEKESGHIRNQRGDYSHTFSRKDLQAELNLLFEKQKEFGNPHISDGLKEGIETLLMTQRPALSGDAVQKMLGHCTFEPTEPKAAKNTYTAERFVWLTKLNNLRILEQGSEQPLTDTQRAKLMDEPYRKSKLTYAQARKLLGLEDTAFFKGLRYGKDNAEASTLMEMKAYHAISRALEKEGLKDKKSPLNLSPELQDEIGTAFSLFKTDEDITGRLKDRVQPEILEALLKHISFDKFVQISLKALRRIVPLMEQGKRYNEACAEIYGDHYGKKNTEEKIYLPPIPADEIRNPVVLRALSQARKVINGVVRRYGSPARIHIETAREVGKSFKDRKEIEKRQEENRKDREKAAAKFQEYFPNFVGEPKSKDILKLRLYEQQHGKCLYSGKEINLGRLNEKGYVEIDHALPFSRTWDDSFNNKVLVLGSENQNKGNQTPYEYFNGKDNSREWQEFKARVETSRFPRSKKQRILLQKFDEDGFKERNLNDTRYVNRFLCQFVADRMRLTGKGKKRVFASNGQITNLLRGFWGLRKVRAENDRHHALDAVVVACSTVAMQQKITRFVRYKEMNAFDGKTIDKETGEVLHQKTHFPQPWEFFAQEVMIRVFGKPDGKPEFEEADTPEKLRTLLAEKLSSRPEAVHEYVTPLFVSRAPNRKMSGQGHMETVKSAKRLDEGVSVLRVPLTQLKLKDLEKMVNREREPKLYEALKARLEAHKDDPAKAFAEPFYKYDKAGNRTQQVKAVRVEQVQKTGVWVRNHNGIADNATMVRVDVFEKGDKYYLVPIYSWQVAKGILPDRAVVAYADEEDWTVIDESFRFKFVLYSNDLIKVQLKKDSFLGYFSGLDRATGAISLREHDLEKSKGKDGMHRIGVKTALSFQKYQIDEMGKEIRPCRLKKRPPVR

SEQ ID NO: 551 - protein, 1081 aa, Neisseria meningitidis
MAAFKPNPINYILGLDIGIASVGWAMVEIDEEENPIRLIDLGVRVFERAEVPKTGDSLAMARRLARSVRRLTRRRAHRLLRARRLLKREGVLQAADFDENGLIKSLPNTPWQLRAAALDRKLTPLEWSAVLLHLIKHRGYLSQRKNEGETADKELGALLKGVADNAHALQTGDFRTPAELALNKFEKECGHIRNQRGDYSHTFSRKDLQAELNLLFEKQKEFGNPHVSGGLKEGIETLLMTQRPALSGDAVQKMLGHCTFEPAEPKAAKNTYTAERFIWLTKLNNLRILEQGSERPLTDTERATLMDEPYRKSKLTYAQARKLLSLEDTAFFKGLRYGKDNAEASTLMEMKAYHTISRALEKEGLKDKKSPLNLSPELQDEIGTAFSLFKTDEDITGRLKDRIQPEILEALLKHISFDKFVQISLKALRRIVPLMEQGKRYDEACAEIYGDHYGKKNTEEKIYLPPIPADEIRNPVVLRALSQARKVINGVVRRYGSPARIHIETAREVGKSFKDRKEIEKRQEENRKDREKAAAKFREYFPNFVGEPKSKDILKLRLYEQQHGKCLYSGKEINLGRLNEKGYVEIDHALPFSRTWDDSFNNKVLVLGSENQNKGNQTPYEYFNGKDNSREWQEFKARVETSRFPRSKKQRILLQKFDEDGFKERNLNDTRYVNRFLCQFVADRMRLTGKGKKRVFASNGQITNLLRGFWGLRKVRAENDRHHALDAVVVACSTVAMQQKITRFVRYKEMNAFDGKTIDKETGEVLHQKTHFPQPWEFFAQEVMIRVFGKPDGKPEFEEADTPEKLRTLLAEKLSSRPEAVHEYVTPLFVSRAPNRKMSGQGHMETVKSAKRLDEGVSVLRVPLTQLKLKDLEKMVNREREPKLYEALKARLEAHKDDPAKAFAEPFYKYDKAGNRTQQVKAVRVEQVQKTGVWVRNHNGIADNATMVRVDVFEKGDKYYLVPIYSWQVAKGILPDRAVVAYADEEDWTVIDESFRFKFVLYSNDLIKVQLKKDSFLGYFSGLDRATGAISLREHDLEKSKGKDGMHRIGVKTALSFQKYQIDEMGKEIRPCRLKKRPPVR

SEQ ID NO: 552 - protein, 1082 aa, Neisseria meningitidis
MAAFKPNPINYILGLDIGIASVGWAMVEIDEEENPIRLIDLGVRVFERAEVPKTGDSLAMARRLARSVRRLTRRRAHRLLRARRLLKREGVLQAADFDENGLIKSLPNTPWQLRAAALDRKLTPLEWSAVLLHLIKHRGYLSQRKNEGETADKELGALLKGVADNAHALQTGDFRTPAELALNKFEKECGHIRNQRGDYSHTFSRKDLQAELNLLFEKQKEFGNPHVSGGLKEGIETLLMTQRPALSGDAVQKMLGHCTFEPAEPKAAKNTYTAERFIWLTKLNNLRILEQGSERPLTDTERATLMDEPYRKSKLTYAQARKLLGLEDTAFFKGLRYGKDNAEASTLMEMKAYHAISRALEKEGLKDKKSPLNLSPELQDEIGTAFSLFKTDEDITGRLKDRIQPEILEALLKHISFDKFVQISLKALRRIVPLMEQGKRYDEACAEIYGDHYGKKNTEEKIYLPPIPADEIRNPVVLRALSQARKVINGVVRRYGSPARIHIETAREVGKSFKDRKEIEKRQEENRKDREKAAAKFREYFPNFVGEPKSKDILKLRLYEQQHGKCLYSGKEINLVRLNEKGYVEIDHALPFSRTWDDSFNNKVLVLGSENQNKGNQTPYEYFNGKDNSREWQEFKARVETSRFPRSKKQRILLQKFDEEGFKERNLNDTRYVNRFLCQFVADHILLTGKGKRRVFASNGQITNLLRGFWGLRKVRAENDRHHALDAVVVACSTVAMQQKITRFVRYKEMNAFDGKTIDKETGEVLHQKTHFPQPWEFFAQEVMIRVFGKPDGKPEFEEADTPEKLRTLLAEKLSSRPEAVHEYVTPLFVSRAPNRKMSGQGHMETVKSAKRLDEGVSVLRVPLTQLKLKDLEKMVNREREPKLYEALKARLEAHKDDPAKAFAEPFYKYDKAGNRTQQVKAVRVEQVQKTGVWVRNHNGIADNATMVRVDVFEKGGKYYLVPIYSWQVAKGILPDRAVVQGKDEEDWQLIDDSFNFKFSLHPNDLVEVITKKARMFGYFASCHRGTGNINIRIHDLDHKIGKNGILEGIGVKTALSFQKYQIDELGKEIRPCRLKKRPPVR

SEQ ID NO: 553 - protein, 1081 aa, Neisseria meningitidis
MAAFKPNPINYILGLDIGIASVGWAMVEIDEEENPIRLIDLGVRVFERAEVPKTGDSLAMARRLARSVRRLTRRRAHRLLRARRLLKREGVLQAADFDENGLIKSLPNTPWQLRAAALDRKLTPLEWSAVLLHLIKHRGYLSQRKNEGETADKELGALLKGVADNAHALQTGDFRTPAELALNKFEKESGHIRNQRGDYSHTFSRKDLQAELILLFEKQKEFGNPHVSGGLKEGIETLLMTQRPALSGDAVQKMLGHCTFEPAEPKAAKNTYTAERFIWLTKLNNLRILEQGSERPLTDTERATLMDEPYRKSKLTYAQARKLLGLEDTAFFKGLRYGKDNAEASTLMEMKAYHAISRALEKEGLKDKKSPLNLSPELQDEIGTAFSLFKTDEDITGRLKDRVQPEILEALLKHISFDKFVQISLKALRRIVPLMEQGKRYDEACAEIYGDHYGKKNTEEEIYLPPITADEIRNPVVLRALSQARKVINAVVRRYGSPARIHIETAREVGKSFKDRKEIEKRQEENRKDREKAAAKFREYFPNFVGEPKSKDILKLRLYEQQHGKCLYSGKEINLVRLNEKGYVEIDHALPFSRTWDDSFNNKVLVLGSENQNKGNQTPYEYFNGKENSREWQEFKARVETSRFPRSKKQRILLQKFDEDGFKERNLNDTRYVNRFLCQFVADRMRLTGKGKKRVFASNGQITNLLRGFWGLHKVRAENDRHHALDAVVVACSTIAMQQKITRFVRYKEMNAFDGKTIDKETGEVLHQKAHFPQPWEFFAQEVMIRVFGKPDGKPEFEEADTPEKLRTLLAEKLSSRPEAVHEYVTPLFVSRAPNRKMSGQGHMETVKSAKRLDEGISVLRVPLTQLKLKDLEKMVNRAREPKLYEALKARLEAHKDDPAKAFAEPFYKYDKAGNRTQQVKAVRVEQVQKTGVWVRNHNGIADNATMVRVDVFEKAGKYYLVPIYSWQVAKGILPDRAVVAYADEEDWTVIDESFRFKFVLYSNDLIKVQLKKDSFLGYFSGLDRATGAISLREHDLEKSKGKDGMHRIGVKTALSFQKYQIDEMGKEIRPCRLKKRPPVR

SEQ ID NO: 554 - protein, 1082 aa, Neisseria meningitidis
MAAFKPNPINYILGLDIGIASVGWAMVEIDEEENPIRLIDLGVRVFERAEVPKTGDSLAMARRLARSVRRLTRRRAHRLLRARRLLKREGVLQAADFDENGLIKSLPNTPWQLRAAALDRKLTPLEWSAVLLHLIKHRGYLSQRKNEGETADKELGALLKGVANNAHALQTGDFRTPAELALNKFEKESGHIRNQRGDYSHTFSRKDLQAELILLFEKQKEFGNPHVSGGLKEGIETLLMTQRPALSGDAVQKMLGHCTFEPAEPKAAKNTYTAERFIWLTKLNNLRILEQGSERPLTDTERATLMDEPYRKSKLTYAQARKLLGLEDTAFFKGLRYGKDNAEASTLMEMKAYHAISRALEKEGLKDKKSPLNLSSELQDEIGTAFSLFKTDEDITGRLKDRVQPEILEALLKHISFDKFVQISLKALRRIVPLMEQGKRYDEACAEIYGDHYGKKNTEEKIYLPPIPADKIRNPVVLRALSQARKVINGVVRRYGSPARIHIETAREVGKSFKDRKEIEKRQEENRKDREKAAAKFREYFPNFVGEPKSKDILKLRLYEQQHGKCLYSGKEINLVRLNEKGYVEIDHALPFSRTWDDSFNNKVLVLGSENQNKGNQTPYEYFNGKDNSREWQEFKARVETSRFPRSKKQRILLQKFDEDGFKECNLNDTRYVNRFLCQFVADHILLTGKGKRRVFASNGQITNLLRGFWGLRKVRAENDRHHALDAVVVACSTVAMQQKITRFVRYKEMNAFDGKTIDKETGKVLHQKTHFPQPWEFFAQEVMIRVFGKPDGKPEFEEADTPEKLRTLLAEKLSSRPEAVHEYVTPLFVSRAPNRKMSGAHKDTLRSAKRFVKHNEKISVKRVWLTEIKLADLENMVNYKNGREIELYEALKARLEAYGGNAKQAFDPKDNPFYKKGGQLVKAVRVEKTQESGVLLNKKNAYTIADNGDMVRVDVFCKVDKKGKNQYFIVPIYAWQVAENILPDIDCKGYRIDDSYTFCFSLHKYDLIAFQKDEKSKVEFAYYINCDSSNGRFYLAWHDKGSKEQQFRISTQNLVLIQKYQVNELGKEIRPCRLKKRPPVR

SEQ ID NO: 555 - protein, 1082 aa, Neisseria meningitidis
MAAFKPNPINYILGLDIGIASVGWAMVEIDEEENPIRLIDLGVRVFERAEVPKTGDSLAMARRLARSVRRLTRRRAHRLLRARRLLKREGVLQAADFDENGLIKSLPNTPWQLRAAALDRKLTPLEWSAVLLHLIKHRGYLSQRKNEGETADKELGALLKGVANNAHALQTGDFRTPAELALNKFEKESGHIRNQRGDYSHTFSRKDLQAELILLFEKQKEFGNPHVSGGLKEGIETLLMTQRPALSGDAVQKMLGHCTFEPAEPKAAKNTYTAERFIWLTKLNNLRILEQGSERPLTDTERATLMDEPYRKSKLTYAQARKLLGLEDTAFFKGLRYGKDNAEASTLMEMKAYHAISRALEKEGLKDKKSPLNLSSELQDEIGTAFSLFKTDEDITGRLKDRVQPEILEALLKHISFDKFVQISLKALRRIVPLMEQGKRYDEACAEIYGDHYGKKNTEEKIYLPPIPADEIRNPVVLRALSQARKVINGVVRRYGSPARIHIETAREVGKSFKDRKEIEKRQEENRKDREKAAAKFREYFPNFVGEPKSKDILKLRLYEQQHGKCLYSGKEINLVRLNEKGYVEIDHALPFSRTWDDSFNNKVLVLGSENQNKGNQTPYEYFNGKDNSREWQEFKARVETSRFPRSKKQRILLQKFDEDGFKECNLNDTRYVNRFLCQFVADHILLTGKGKRRVFASNGQITNLLRGFWGLRKVRAENDRHHALDAVVVACSTVAMQQKITRFVRYKEMNAFDGKTIDKETGKVLHQKTHFPQPWEFFAQEVMIRVFGKPDGKPEFEEADTPEKLRTLLAEKLSSRPEAVHEYVTPLFVSRAPNRKMSGAHKDTLRSAKRFVKHNEKISVKRVWLTEIKLADLENMVNYKNGREIELYEALKARLEAYGGNAKQAFDPKDNPFYKKGGQLVKAVRVEKTQESGVLLNKKNAYTIADNGDMVRVDVFCKVDKKGKNQYFIVPIYAWQVAENILPDIDCKGYRIDDSYTFCFSLHKYDLIAFQKDEKSKVEFAYYINCDSSNGRFYLAWHDKGSKEQQFRISTQNLVLIQKYQVNELGKEIRPCRLKKRPPVR

SEQ ID NO: 556 - protein, 1082 aa, Neisseria meningitidis
MAAFKPNPINYILGLDIGIASVGWAMVEIDEEENPIRLIDLGVRVFERAEVPKTGDSLAMARRLARSVRRLTRRRAHRLLRTRRLLKREGVLQAANFDENGLIKSLPNTLWQLRAAALDRKLTPLEWSAVLLHLIKHRGYLSQRKNEGETADKELGALLKGVAGNAHALQTGDFRTPAELALNKFEKESGHIRNQRGDYSHTFSRKDLQAELNLLFEKQKEFGNPHISDGLKEGIETLLMTQRPALSGDAVQKMLGHCTFEPTEPKAAKNTYTTERFIWLTKLNNLRILEQGSERPLTDTERATLMDEPYRKSKLTYAQARKLLELDDIAFFKGLRYGKDNAEASTLMEMKAYHAISRALEKEGLKDKKSPLNLSPELQDEIGTAFSLFKTDEDITGRLKDRIQPEILEALLKHINFDKFVQISLKALRRIVPLMEQGKRYDEACAEIYGDHYGKKNTEEKIDLPPIPADEIHNPVVLRALSQARKVINGVVRRYGSPARIHIETAREVGKSFKDRKEIEKRQEENRKDREKAAAKFREYFPNFVGEPKSKDILKLRLYEQQHGKCLYSGKEINLGRLNEKGYVEIDHALPFSRTWDDSFNNKVLVLGSENQNKGNQTPYEYFNGKDNSREWQEFKARVETSRFPRSKKQRILLQKFDEDGFKERNLNDTRYVNRFLCQFVADRMRLTGKGKKRVFASNGQITNLLRGFWGLRKVRAENDRHHALDAVVVACSTVAMQQKITRFVRYKEMNAFDGKTIDKETGEVLHQKTHFPQPWEFFAQEVMIRVFGKPDGKPEFEEADTPEKLRTLLTEKLSSRPEAVHEYVTPLFVSRAPNRKMSGQGHMETVKSAKRLDEGISVLRVPLTQLKLKDLEKMVNREREPKLYEALKARLEAHKDDPAKAFAEPFYKYDKAGNRTQQVKAMRVEQVQKTGVWVRNHNGIADNATMVRVDVFEKGDKYYLVPIYSWQVAKGILPDRAVVQGKDEEDWQLIDDSFNFKFSLHPNDLVEVITKKARMFGYFASCHRGTGNINIRIHDLDHKIGKNGILEGIGVKTALSFQKYQIDELGKEIRPCRLKKRPPVR

SEQ ID NO: 557 - protein, 1082 aa, Neisseria meningitidis
MAAFKPNPINYILGLDIGIASVGWAMVEIDEEENPIRLIDLSVRVFERAEVPKTGDSLAMARRLARSVRRLTRRRAHRLLRARRLLKREGVLQAADFDENGLIKSLPNTPWQLRAAALDRKLTPLEWSAVLLHLIKHRGYLSQRKNEGETADKELGALLKGVADNAHALQTGDFRTPAELALNKFEKESGHIRNQRGDYSHTFSRKDLQAELILLFEKQKEFGNPHVSGGLKEGIETLLMTQRPALSGDAVQKMLGHCTFEPAEPKAAKNTYTAERFVWLTKLNNLRILEQGSERPLTDTERATLMDEPYRKSKLTYAQARKLLGLEDTAFFKGLRYGKDNAEASTLMEMKAYHAISRALEKEGLKDKKSPLRLSPELQDEIGTAFSLFKTDEDITGRLKDRVQPEILEALLKHISFDKFVQISLKALRRIVPLMEQGKRYDEACAEIYGDHYGKKNAEEKIYLPPIPADEIRNPVVLRALSQARKVINGVVRRYGSPARIHIETAREVGKSFKDRKEIEKRQEENRKDREKAAAKFREYFPNFVGEPKSKDILKLRLYEQQHGKCLYSGKEINLGRLNEKGYVEIDHALPFSRTWDDSFNNKVLVLGSENQNKGNQTPYEYFNGKDNSREWQEFKARVETSRFPRSKKQRILLQKFDEDGFKERNLNDTRYVNRFLCQFVADRMRLTGKGKKRVFASNGQITNLLRGFWGLRKVRAENDRHHALDAVVVACSTVAMQQKITRFVRYKEMNAFDGKTIDKETGEVLHQKTHFPQPWEFFAQEVMIRVFGKPDGKPEFEEADTPEKLRTLLAEKLSSRPEAVHEYVTPLFVSRAPNRKMSGQGHMETVKSAKRLDEGVSVLRVPLTQLKLKDLEKMVNREREPKLYEALKARLEAHKDDPAKAFAEPFYKYDKAGNRTQQVKAVRVEQVQKTGVWVRNHNGIADNATMVRVDVFEKGDKYYLVPIYSWQVAKGILPDRAVVQGKDEEDWQLIDDSFNFKFSLHPNDLVEVITKKARMFGYFASCHRGTGNINIRIHDLDHKIGKNGILEGIGVKTALSFQKYQIDELGKEIRPCRLKKRPPVR

SEQ ID NO: 558 - protein, 1082 aa, Neisseria meningitidis
MAAFKPNSINYILGLDIGIASVGWAMVEIDEEENPIRLIDLGVRVFERAEVPKTGDSLAMARRLARSVRRLTRRRAHRLLRTRRLLKREGVLQAANFDENGLIKSLPNTPWQLRAAALDRKLTPLEWSAVLLHLIKHRGYLSQRKNEGETADKELGALLKGVAGNAHALQTGDFRTPAELALNKFEKESGHIRNQRSDYSHTFSRKDLQAELILLFEKQKEFGNPHVSGGLKEGIETLLMTQRPALSGDAVQKMLGHCTFEPAEPKAAKNTYTAERFIWLTKLNNLRILEQGSERPLTDTERATLMDEPYRKSKLTYAQARKLLGLEDTAFFKGLRYGKDNAEASTLMEMKAYHAISRALEKEGLKDKKSPLNLSPELQDEIGTAFSLFKTDEDITGRLKDRIQPEILEALLKHISFDKFVQISLKALRRIVPLMEQGKRYDEACAEIYGDHYGKKNTEEKIYLPPIPADEIRNPVVLRALSQARKVINGVVRRYGSPARIHIETAREVGKSFKDRKEIEKRQEENRKDREKAAAKFREYFPNFVGEPKSKDILKLRLYEQQHGKCLYSGKEINLGRLNEKGYVEIDHALPFSRTWDDSFNNKVLVLGSENQNKGNQTPYEYFNGKDNSREWQEFKARVETSRFPRSKKQRILLQKFDEDGFKERNLNDTRYVNRFLCQFVADRMRLTGKGKKRVFASNGQITNLLRGFWGLRKVRAENDRHHALDAVVVACSTVAMQQKITRFVRYKEMNAFDGKTIDKETGEVLHQKTHFPQPWEFFAQEVMIRVFGKPDGKPEFEEADTLEKLRTLLAEKLSSRPEAVHEYVTPLFVSRAPNRKMSGQGHMETVKSAKRLDEGVSVLRVPLTQLKLKDLEKMVNREREPKLYEALKARLEAHKDDPAKAFAEPFYKYDKAGNRTQQVKAVRVEQVQKTGVWVRNHNGIADNATMVRVDVFEKGDKYYLVPIYSWQVAKGILPDRAVVQGKDEEDWQLIDDSFNFKFSLHPNDLVEVITKKARMFGYFASCHRGTGNINIRIHDLDHKIGKNGILEGIGVKTALSFQKYQIDELGKEIRPCRLKKRPPVR

SEQ ID NO: 559 - protein, 67 aa, Neisseria meningitidis
MFGYFASCHRGTGNINIRIHDLDHKIGKNGILEGIGVKTALSFQKYQIDELGKEIRPCRLKKRPPVR

SEQ ID NO: 560 - protein, 220 aa, Neisseria mucosa
MRHIFSDGLKEGIETLLMTQRPALSGDAVQKMLGHCTFEPTEPKAAKNTYTAERFIWLTKLNNLRILEQGSERPLTNTERATLMDEPYRKSKLTYAQARKLLGLKDTAFFKGLRYGKDNAEASTLMEMKAYHAISRALEKEGLKDKKSPLNLSPELQDEIGTAFSLFKTDEDITGRLKTELTPASNKTLSRPFTVKSASNGSTSAPWLPSTKWFLHFKPA

SEQ ID NO: 561 - protein, 392 aa, Neisseria sp.
MAPFTLKPLNYILGLDIGIASVGWAVVETDSDVLPYRLIDVGVRTFDRAEVPKTGESPAAARRLARSVRRMIRRRAHRMLRARRLLKREGMLQAADFDAHGLVENLPVNPWQLRVDALSRKLMPLEWAAVLLHMVKHRGYLSQRKNERNSSDKELGALLSGVAANSEALQGGDFRTPAELAVNKFEKESGHIRNQRGDYSHTFNRKDVQAELVLLFEKQKEYGNPYISDGLLTGVEDLLMTQRAALSGDAVQKMLGRCTFEPEEYKAAKNTYSAERFVWLTKLNNLRILDQGSERPLTDSERAKLMDEPYKKTKLTYAQVRRLLELDDTAFFKGLRYSKDNAESATLMEMKAYHSISGALEKAGLKNKKIAAGLIARIAGRNRRGVFAIQNR

SEQ ID NO: 562 - protein, 701 aa, Neisseria sp.
MQDEIGEAFSLFKTDEDIRGRLKGKLPDEQLDALLEYVSFDKFVQLSLKALRKILPLMEQGKRYDEACAEIYGDHYGIKDDKQAQFLPPVSADEIRNPVVLRALSQARKVVNAVVRRYGSPARVHIETAREVGKSFLDRKKIEKRQEENRKDRERSIAKFREYFPNFVGEPKAKDILKMRLYEQQQGQCLYSGKAIDLRRLNEKGYVEIDHALPFSRTWDDSFNNKVLVLAGENQNKRNQTPFEWLGGDEKRWREFTARVEHCRFPRSKKQRILMQKLDEKDFKERNLNDTRYVNRFLCNFIAQNMLLTGEDKNRVFASNGQITNLLRGMWGLKKVRESNDRHHALDAVVVACSTVAMQQKITNYVRQKEMNVFDGEMVDKTTGEVSRLHFPQPWDFFRQEVMMRVFGKPDTPSENNEEADTPEKLRALLADKLSSRPEAVHEAVTPLFVSRAPSRKMSGQGHMETIKSAKRLSEGKSVLRVPLTQLTPKLLENMVNREREPQLYEDLLGRLNAHGGDPAKAFAAPFFKRDKAGNPTQQVKAVRVEDVQKSGVIVREGNGVADNATMVRVDVFEKGGKYYLMPIYTWQAAKGILPNKAVIAHTDEANWQEMDTSFTFKFALYPNDLVLASLKKETYFGYFAGLDRSTGNISLRVHDLEKSKGKDGVYRIGVKTALSFQKYQVDELGKTIRPCRLKKRPPVR

SEQ ID NO: 563 - protein, 1089 aa, Neisseria sp.
MTAFKPNPLNYILGLDIGIASVGWAMVEIDDKENPVRLIDLGVRVFERAEMPKTGDSLAAARRLARSVRRLTRRRAHRLLRARRLLKHEGVLKPEDFDENGLVKPLPYIPKQPRNTPWQLRAAALDRKLTPLEWAAVLLHLVKHRGYLSQRKNEGETDDKELGALLKGVADNTHALQAGNFRTPAELALNKFEKESGHIRNQRGDYSHTFSRKDLQAELVLLFEKQKEFGNPYVSDDLKNGIENLLMTQRPALSGDAIQKMLGHCTFEPAEPKAAKNTYTAERFIWLTKLNNLRILNQGNERPLTDAERTTLMDEPYKKSKLTYAQARKLLDLDDTAFFKGLRYGKDNAESATLMEMKAYHAISRALEKEGLKDKKSPLSLSPELQDEIGTAFSLFKTDEEITGRLKGCLQPEILDALLKHISFDKFVQISLKALRRIVPLMEQGKRYDEACAEIYGDHHGRRNSEETLYLPPIPADEIRNPVVLRALSQARKVINGVGRRYGSPARIHIETAREVGKSFKDRKEIEKRQEENRKDREKAAAEFQEYFPNFVGEPKSKDILKLRLYRQQNCKCLYSGKEINLGRLNEKGYVEIDHALPFSRTWDDSFNNKVLVLGSENQNKGNRTPYEYLNGKDNSREWQEFKARVETSRFPHSKKQRILLQKFDEEGFKERNLNDTRYVNRFLCKFVADHMQLTGKGKRRVFASNGQITNLLRGFWGLRKVRAENDRHHALDAVVVACSTVAMQQRITRFVRYKEMNAFDGKTVDKETGEVLHQKTHFPQPWEFFAQEVMIRVFGKPDGKPELEEADTPEKLRALLAEKLSSRPEAVHEYVAPLFVSRAPNRKMSGQGHMETIKSPKRLDEGISVVRVPLTQLKLKDLEKMVNREREPKLYEALKARLEAHKDDPAKAFAEPFYKQDKAGNRTQQVKAVRIEQVQKTGVWVRNQNGIADNATMVRVDVFEKGGKYYLVPIYSWQVAKGILPDKAIIAFKDEEEWQLIDDSFNFKFPLHPNDLVEVITKKARIFGYFASCHRGTGNINIRIHDLDNKVGKNGILEGIGVKTALSFQKYQIDELGKEIRPCRLKKRPPVR

SEQ ID NO: 564 - protein, 1097 aa, Neisseria wadsworthii
MKKQPQRYILGLDLGIASVGWALILVDGAENPVGLLDCGVRTFERAEVPKTGDSLALARRQARSVRRLIRRRAHRLLRLRRLLKREGILSAADFNSDGLPNLPIDAWQLRVAGLERKLTNQEWAAVLLHLVKHRGYLSQRKSETQTENKELGRLLAGVAENSKLLSESSEQYRTPAELAVKLFAEQSGHLRNKGGEYTHTFNRLDLQKELHLLFERQYALGNPFASAELQSKVDELLMTQRSALQGEAVLKMLGKCTFEPSEYKAAKNTYSAERFIWLTKLNNLRILYNGEERALDEGDRKKLLDEPYKKAKLTYKQVRSILNLPESAVFKGLRYGKDSDGLKAENGTLMEMKAYHKIRTILDKAGLKGEWENRIRNPEILDKIGTAFSLYKTDEDIQAALADLRLPENVLDALLAGLNFDKFIQLSLKALRNILPLMERGIRYDEACKEVYGDHRALAESKNQVLLPPIPADEIRNPVVLRTLTQARKVINAIIRRYGSPQRVHIETARELGKSKQERDKIDRKNKENQNDRNRLASDIRKHFNFEPTPKDILKLRLYEQQHGKCLYSDLREEKGECLYTGNVIELHRLFEDGYVEIDHALPLSRTWDNSLNNKVLVLKSSNQNKGNKTPYEWLDGANNSRRWREFQARVQGCHFPYVKKQRIQTAKLDSKAEQGFLERNLNDTRYISKFMCQFITANLRLAETSNALMEEVAGENPYWKERKRQRVFAPSGSIIALLRGLWGLKKVREDNDRHHALDAIVVACSTVSMQQKITKAMQRRETLETVDSETGEVKTRIPQPWDFFRQEVMIRVFSDSPREELAEKLNSRPEALHDFVSPLFVSRAPNRKMTGQGHLETVKSAKRLSENISVVRKPLTALKLKDIENIVGYPDREPALYQALRERLLAHKDDPVKAFADKPFYKPAKDGGQGSLVKAVRIIENTKHGLKIRNGITDTNGDMVRTDVYQKTDKKGKRQYFIVPVYAWQVEKNELPTVDCKGYEIDDNYEFCFSLYKYDLIEIQNPNDINQELRAYYINCDSSDGRFWLAYHDKSAKEQQFRISTQNQPIIKKYQVDTLGKEIRLCKAEKRTALNGKKKK

SEQ ID NO: 565 - protein, 1426 aa, Niabella soli
MPRKNILGLDLGTTSIGFAKIIEDDDYQCSSVELIGVRVNPLTTDEQTNFEKGKPVSVNADRTLKRGMRRNLDRYQLRRDYLIEILRTHHIITADTKLAEDGKNTTHTTYALRALAATAEIPLEAFVRVLLAINKKRGYKSSRKAKNEDEGQLIDGMAIARRLYEESLTPGQFSYQLLKEGKKYLPDFYRSDLNTELNKVWNFQKQFYPEILTDEFKRHLEGKGQRATAVAFWGQHGFSMAENKGSREEKKLHAYKWRSEAAHKQLTKEEVAFVITEINNDLNKSSGYLGAISDRSKELFFNKQTVGQYLHQQLKENPHTRLKGQVFYRQDYLDEFETIWEMQAKFYSALTLELKEEVRDVVIFYQRKLKSQMGLISLCEFESKEIEIEKNGEKAKKRIGLRVAPKSSPLFQEFKIWQVLNNLEFRNKKTKEVFVPEMAAKQQLFDELNIKGNLLASEAIKILGYKTKDWEANYHTLEGNRTNKSLYDAWLKILELEGYDENLLKLSGSDDIDVSKIEKPALEIRQMVLAVFEVLGISGAILDFDAEADGKAFEQQPAYQLWHLLYSAEDDGKKYSQEDIFTYGHDNIGLKKKLCEKFGFRPEHTKILVNVVFSDDYGNLSSKAMRRIYPFIKELTYDKACAEAGYRHSAASLTKEEIAARPLQNRLDLLKKNELRSPVVEKILNQMVNVVNTLVDDENQNRKARGLSEDFHFDEIRIELARELKKNAKERAEMTTNINTAKQSHEKIIRILQTEFGVPNPSRNDIVRYKLYEELKNNGYKDLYTNTYISRDILFSKQIDVDHIIPQMSLFDDSFSNKTVVFRKDNQDKGNKTAYDYILGKYGEQALEEYISRITSLFELGKKNKEEGIGKAKFQKLQKRLVDIGDGFIERDLRESQYIAKKANNMLYAICRSVVSTSGEITARLREDWDLVNVMQEINLPKFRALGLTEMVEKKDGAQKERITDWTKRNDHRHHAMDALAIAFTRHSHIQYLNHLNARKDEANKWHPVVSKIEEKETVLIYDDLGNRKRKFKAPMPNFREVVKEHLENVLISHKAKNKVVTKNKNKIKTVRGEKVKTELTPRGQLHKETIYGRYRYYESKEEKIGPKFDAEMIGMVTNPQYKKLLLERLAANGNDPKKAFWGKNALNKNPLYVDEARQELLPEKILLRWLNDDYSIRKDVTPENLKDIKTIEKILDKGVKKILLKRLADFGNDPKKAFSDLDKNPIWQNEAKRIAIKRVTISGIKNAAPLHHKKDHLGNDILDEKGKQIPSSFVSTGNNHHVAIYRDAEGNLQERVVSLFDAVQLVNGGEPVIDKEYNKGIGWQFLFTMKQNEMFVFPDEKTGFNPREVDLLSSGNRKLISPNLFRVQKLASKNYFFRHHLETSVEEKKELKNIAYKPQLGLNALSNIVKVRINHIGEIVSVGEY

SEQ ID NO: 566 - protein, 79 aa, Nitritalea halalkaliphila
MPLRLPERVYKMISSTGAECHFLPVNVSSLIKGYDAKSKLGEFGSQNKQEVTSDSFIRVKERCYKLEINRLGIPLNRLK

SEQ ID NO: 567 - protein, 1498 aa, Odoribacter laneus
METTLGIDLGTNSIGLALVDQEEHQILYSGVRIFPEGINKDTIGLGEKEESRNATRRAKRQMRRQYFRKKLRKAKLLELLIAYDMCPLKPEDVRRWKNWDKQQKSTVRQFPDTPAFREWLKQNPYELRKQAVTEDVTRPELGRILYQMIQRRGFLSSRKGKEEGKIFTGKDRMVGIDETRKNLQKQTLGAYLYDIAPKNGEKYRFRTERVRARYTLRDMYIREFEIIWQRQAGHLGLAHEQATRKKNIFLEGSATNVRNSKLITHLQAKYGRGHVLIEDTRITVTFQLPLKEVLGGKIEIEEEQLKFKSNESVLFWQRPLRSQKSLLSKCVFEGRNFYDPVHQKWIIAGPTPAPLSHPEFEEFRAYQFINNIIYGKNEHLTAIQREAVFELMCTESKDFNFEKIPKHLKLFEKFNFDDTTKVPACTTISQLRKLFPHPVWEEKREEIWHCFYFYDDNTLLFEKLQKDYALQTNDLEKIKKIRLSESYGNVSLKAIRRINPYLKKGYAYSTAVLLGGIRNSFGKRFEYFKEYEPEIEKAVCRILKEKNAEGEVIRKIKDYLVHNRFGFAKNDRAFQKLYHHSQAITTQAQKERLPETGNLRNPIVQQGLNELRRTVNKLLATCREKYGPSFKFDHIHVEMGRELRSSKTEREKQSRQIRENEKKNEAAKVKLAEYGLKAYRDNIQKYLLYKEIEEKGGTVCCPYTGKTLNISHTLGSDNSVQIEHIIPYSISLDDSLANKTLCDATFNREKGELTPYDFYQKDPSPEKWGASSWEEIEDRAFRLLPYAKAQRFIRRKPQESNEFISRQLNDTRYISKKAVEYLSAICSDVKAFPGQLTAELRHLWGLNNILQSAPDITFPLPVSATENHREYYVITNEQNEVIRLFPKQGETPRTEKGELLLTGEVERKVFRCKGMQEFQTDVSDGKYWRRIKLSSSVTWSPLFAPKPISADGQIVLKGRIEKGVFVCNQLKQKLKTGLPDGSYWISLPVISQTFKEGESVNNSKLTSQQVQLFGRVREGIFRCHNYQCPASGADGNFWCTLDTDTAQPAFTPIKNAPPGVGGGQIILTGDVDDKGIFHADDDLHYELPASLPKGKYYGIFTVESCDPTLIPIELSAPKTSKGENLIEGNIWVDEHTGEVRFDPKKNREDQRHHAIDAIVIALSSQSLFQRLSTYNARRENKKRGLDSTEHFPSPWPGFAQDVRQSVVPLLVSYKQNPKTLCKISKTLYKDGKKIHSCGNAVRGQLHKETVYGQRTAPGATEKSYHIRKDIRELKTSKHIGKVVDITIRQMLLKHLQENYHIDITQEFNIPSNAFFKEGVYRIFLPNKHGEPVPIKKIRMKEELGNAERLKDNINQYVNPRNNHHVMIYQDADGNLKEEIVSFWSVIERQNQGQPIYQLPREGRNIVSILQINDTFLIGLKEEEPEVYRNDLSTLSKHLYRVQKLSGMYYTFRHHLASTLNNEREEFRIQSLEAWKRANPVKVQIDEIGRITFLNGPLC

SEQ ID NO: 568 - protein, 1389 aa, Oenococcus kitaharae; identical to SEQ ID NO: 236

SEQ ID NO: 569 - protein, 1535 aa, Ornithobacterium rhinotracheale
MNTILGLDLGTNSIGWALIKVLNDKTRLPLEIIDLGVVVIPTDQRTLDKFSKGESISKTAERTKQKGVRKLYERKKLRRERLHRVLNILGFLPEHYSKKIDFKKHLGQFFGNSQPKISYVENDHGKHEFIFMDSYREMLKEFSKHNIKNVPYDWTIYYLRKKALSQKISKEELAWVILNFNKKRGYYQFRDDNADENKENKIEKYYALKVTNVKKEDAQNYTITLENGWIYKNKSKISLLDWVGSTKEFISTEKFDNKGNIIKKKNGEDDRTLKLVDSEKDWIAIKKSTEDRIENYGKTVGTYLYEHLLKDPNQKLNGELINIIDRKFYKNELKQILEKQKEFHPELLNEDLFQKSIIELYPKNSTRQKELKNKDLCYLLIDDVIYYQRDLKKKNSTINKCSFESREYYLNGEKQIQKINCIAKSKPLYQEFRTLQFIKNLKVYEIIDGLEKDITSKLLPDFETKEHFFEWLNDKEKIDQLQLLSYKCFDLHDNVKNDLIAKGIKRPTEKAIRTELLEKYRWNYSKDNDRNFLLNETRFKILKYLKKVDKKLTLTNEQIESLWLLLYSAKDERELKNGLQKFSEKNKLPKKFSDIFISFPPFKKEYGAYSEKALKKLLSLVRFGKYWSFNKIDNNIQNKIMNILNGEVDDSISDRVREKTILLQDKNDFQDLPLWLASYVAYNRFSEVSEIKYWDSPDKIEFLKQHSIGNPIVEKIINETLKLIKDIWVIHGKSCKNFFSEIHIELSREIKSSSKKRAQITNNNTKNQKLNNLIKSLLIEMASDTKYENVTPYSPSQQEILKIYDEGIYSKEENSEKIKEINKIRNNNKISKSDITKYKLWLEQGYISPYTGKIIPLTKLFTAKYQKEHIIPQTKFFDDSFNNKVICEAEVNKLKDNSLAMNFIKAKGGKAVKLSDGETVTILNQEEYKQLVRTSFKKNSIKLRNLLLEEIPDTFTKRQLNDTKYISKLVLSLLSNIVREKGELESTAKRIVSTNGQITSILRNDWGLNNIWNKLITPRFERLNNINKNKIYGNWENKKGKNVFQINYLNDNLSTLNTKRIDHRHHALDALIVACTTRNHINFLNNQYAKSRNQRHDLRAKLKRRETITTEGSKKQVFKDFIKPWESFTQDALKKLETTIVNFKVNKRIINKTINWYKKWEKQKDGTYKKIQKKQTKGDAWAIRKPLHIDTIYGIVCKKLPLKSALENYKNIIDENLKHKIKELKEVNKFDNNQIINFFKECNFIFEDNNIQKVEVYDFKDNRDKTILSSSRQLIDESFTPKKIGKVLDPTIRNILLKHLNSTKYNNKFDSDGNPIKPEKLAFSPEGLKDLNKNIKHLNNNKEHQPIKRVKLFETLGNKIKVGYTQQKNKKFAETATGTNLFLGIYSDNNKRDFKTIPLILAIQREKEGLNPCPDTDEKGNQLLFSLSPNELVFVPNNEERKNPNLVDFENLSKDQIDRIYKFVSCTGSEAYFVPSRTAKPIIENENGTNNKSQRIIEFNEKTSIKNEKNEPVLIKTICWKIEVNRLGKIIKVIK

SEQ ID NO: 570 - protein, 103 aa, Parabacteroides merdae
MIVYRLFYRFLFKATKLVNFVIHKELKRQIARTGKIKFHSGGCGCQSGNYKMQNFEKGKSITTNADRTLKRSMRRNLYRCKLRRDVLIELLKKVGFIPEKQWK

SEQ ID NO: 571 - protein, 82 aa, Parabacteroides merdae
MSIWKLQYPPLDLKIYNKFLVYSRVNPLTVDEMQNFEKGKSITTNADRTLKRSMRRNLQRYKLRRDVLIELLKKVGFMSEKQ

SEQ ID NO: 572 - protein, 84 aa, Parabacteroides merdae
MSIWKLQYPPLDLKIYNKFLVYSRVNPLTVDEMQNFEKGKSITTNADRTLKRSMRRNLYRCKLRRDVLIELLKKVGFIPEKQWK

SEQ ID NO: 573 - protein, 398 aa, Pasteurella bettyae
MLANENQNKGNLTPYEWLDGKNNSKRWQDFVARVQTCCFSHRKKQHILSHKLDEKSFIERNLNDTRYVARFLCNFIADNMLLTGKGKRKVFASNGQITALLRGRWGLQKVRDDNDRHHALDAVVIACSTVAMQQKITRFVKYEEGNVFSGERIDRETGEIIPLYFPTPWKFFKENVEIRIFSENPKLELENRLPDYPQYNHEFVQPLFVSRMPTRKMTGQGHMETIKSAKRLDEGISVLKVPLTQLKLADLENMVNRERELALYEALKERLELFGNDPAKAFIEPFYKKGGALVKAVRVKKVQKSGVLVRDGNGVADNALMVRVDVFTKGGKYFLVPIYTWQVAKGILPNKAVTANIDEIDWLEMDESYQFIFTMYPNDLVKVKLKKEEFFGYYGGLD

SEQ ID NO: 574 - protein, 610 aa, Pasteurella bettyae
MNMLKPLNYILGLDLGIGSVGWAVVEIDEQGNPLRLIDVGVRTFERAEVAKTGESLALARRLARSSRRLVKRRAARIKKAKRLLKAENILLSVDEILPNDVWQLRVKGLDHKLERQEWAAVLLHLLKRRGYLSQRKNESKSENKELGALLSGVVTNHQILQTDEYRTPAEIAVHKFQAEDGHIRNQRGDYTHTFSRLDLLAEMELLFQRQTELGNLHTSSKLLENLTALLMWQKPALAGEAILKMLGKCTFEPTEYKAAKNSYSAERFVWLTKLNNLRILEQGAERALTDSERFVLLDQPYEKAKLTYAQVRTLLKLSDEAIFKGVRYQGEDKKTVESKTTLMEMKAYHQIRKALDGADLKDEWNTLKNDSALLDEIGTAFSLYKTDDDISHYLGGKLSEKVLNVLLENLNFDKFIQLSLKALQKILPLMLQGQRYDEAVSAVYGDHYGKKSAESCRLLPAIPANEIHNPVVLRTLTQARKVINAVVRLYGSPARIHIETGRKVGKSYQDRKKLEKQQEENREQRESAVKKFKEYFPNFVGEPKGKDILKLRLYELQQSKCLYSGKSFDPNRLLEKGYVEVDHALPFSRTWDDSFNNKVCLPMKTRIKAI

SEQ ID NO: 575 - protein, 199 aa, Pasteurella multocida
MACATPSMQQKITRFIRFKEVHPYKIENRYEMVDQESGEIISPHFPEPWAYFRQEVNIRVFDNHPDTVLKEMLPDRPQANHQFVQPLFVSRAPTRKMSGQGHMETIKSAKRLAEGISVLRIPLTQLKPNLLENMVNKEREPALYAGLKARLAEFNQDPAKAFTTPFYKQGGQQVKAIRVEQVQKSGVLVRENNGVADNA

SEQ ID NO: 576 - protein, 63 aa, Pasteurella multocida
MQTTNLSYILGLDLGIASVGWAVVEINENEDPIGLIDVGVRIFERAEVPKTGESLALSRRLAR

SEQ ID NO: 577 - protein, 1058 aa, Pasteurella multocida
MQTTNLSYILGLDLGIASVGWAVVEINENEDPIGLIDVGVRIFERAEVPKTGESLALSRRLARSTRRLIRRRAHRLLLAKRFLKREGILSTTDLEKGLPNQAWELRVAGLERRLSAIEWGAVLLHLIKHRGYLSKRKNESQTNNKELGALLSGVAQNHQLLQSDDYRTPAELALKKFAKEEGHIRNQRGAYTHTFNRLDLLAELNLLFAQQHQFGNPHCKEHIQQYMTELLMWQKPALSGEAILKMLGKCTHEKNEFKAAKHTYSAERFVWLTKLNNLRILEDGAERALNEEERQLLINHPYEKSKLTYAQVRKLLGLSEQAIFKHLRYSKESAESATFMELKAWHAIRKALENQGLKDTWQDLAKKPDLLDEIGTAFSLYKTDEDIQQYLEGKLPDSVINALLVSLNFDKFIELSLKSLRKILPLMEQGKRYDQACHEIYGHHYGEKNQQISQLLPVIPTQEIRNPVVLRTLSQARKVINAIIRQYGSPARVHIETGRELGKSFKERREIQKQQEDNRTKRESAVQKFKELFSDFSSEPKSKDILKFRLYEQQHGKCLYSGKEINIHRLNEKGYVEIDHALPFSRTWDDSFNNKVLVLASENQNKGNQTPYEWLQGKINSERWKNFVALVLGSQCSAAKKQRLLTQVIDDNKFIDRNLNDTRYIARFLSNYIQENLLLVGKNKKNVFTPNGQITALLRSRWGLIKVRENNDRHHALDAIVVACATPSMQQKITRFIRFKEVHPYKIENRYEMVDQESGEIISPHFPEPWAYFRQEVNIRVFDNHPDTVLKEMLPDRPQANHQFVQPLFVSRAPTRKMSGQGHMETIKSAKRLAEGISVLRIPLTQLKPNLLENMVNKEREPALYVGLKARLAEFNQDPAKAFATPFYKQGGQQVKAIRVELVQKSGVLVRQGNGVADNAPGSIVRTDVFIKNNKFFLVPIYTWQVAKGILPNKAIVAHKNEDEWEEMDEGAKFKFSIFPNDLIELRTKTECFLGYYIGPDRHNGSISLREHDSEISKGNAGVYRVGVKLALSLEKYHIDELGKNRRICRPHQRRPVR

SEQ ID NO: 578 - protein, 1056 aa, Pasteurella multocida
MQTTNLSYILGLDLGIASVGWAVVEINENEDPIGLIDVGVRIFERAEVPKTGESLALSRRLARSTRRLIRRRARRLLLAKRFLKREGILSTTDLEKGLPNQAWELRVAGLERRLSAIEWGAVLLHLIKHRGYLSKRKNESQTNNKELGALLSGVAQNHQLLQSDDYRTPAELALKKFAKEEGHIRNQRGAYTHTFNRLDLLAELNLLFAQQHQFGNPHCKEHIQQYMTELLMWQKPALSGEAILKMLGKCTHEKNEFKAAKHTYSAERFVWLTKLNNLRILEDGAERALNEEERQLLINHPYEKSKLTYAQVRKLLGLSEQAIFKHLRYSKENAESATFMELKAWHAIRKALENQGLKDTWQDLAKKPDLLDEIGTAFSLYKTDEDIQQYLTNKVPNSVINALLVFLNFDKFIELALKSLRKILPLMEQGKRYDQACREIYGHHYGEANQKTSQLLPAIPAQEIRNPVVLRTLSQARKVINAIIRQYGSPARVHIETGRELGKSFKERREIQKQQEDNRTKRESAVQKFKELFSDFSSEPKSKDILKFRLYEQQHGKCLYSGKEINIHRLNEKGYVEIDHALPFSRTWDDSFNNKVLVLASENQNKGNQTPYEWLQGKINSERWKNFVALVLGSQCSAAKKQRLLTQVIDDNKFIDRNLNDTRYIARFLSNYIQENLLLVGKNKKNVFTPNGQITALLRSRWGLIKIRENNDRHHALDAIVVACATPSMQQKITRFIRFKEVHPYKIENRYEMVDQESGEIISPHFPEPWAYFRQEVNIRVFDNHPDTVLKEMLPDRPQANHQFVQPLFVSRAPTRKMSGQGHMETIKSAKRLAEGISVLRIPLTQLKPNLLENMVNKEREPALYAGLKARLAEFNQDPAKAFTTPFYKQGGQQVKAIRVEQVQKSGVLVRENNGVADNASIVRTDVFIKNNKFFLVPIYTWQVAKGILPNKAIVAHKNEDEWEEMDEGAKFKFSLFPNDLVELKTKKEYFFGYYIGLDRATGNISLKEHDGEISKGKDGVYRVGVKLALSFEKYQVDELGKNRQICRPQQRQPVR

SEQ ID NO: 579 - protein, 134 aa, Pasteurella multocida
MVNKEREPALYAGLKARLAEFNQDPAKAFTTPFYKQGGQQVKAIRVEQVQKSGVLVRENNGVADNASIVRTDVFIKNNKFFLVPIYTWQVAKGILPNKAIVAHKNEDEWEEMDEGAKFKFSLFPNDLVELKTKK

SEQ ID NO: 580 - protein, 53 aa, Pasteurella multocida
YSKENAESATFMELKAWHAIRKALENQGLKDTWQDLAKKPDLLDEIGTAFSLL

SEQ ID NO: 581 - protein, 1366 aa, Pediococcus acidilactici
MGDRKYNLGLDIGTSSIGFAAVDENNQPIRVKGKTAIGVRLFEEGKTAADRRGFRTTRRRLSRRRWRINLLNEIFDAHLAEVDPTFLARLKESNRSNLDPKKSFQGSLLFPERKDYQFYEEYPTIYHLRKALMEEDRKFDIREIYLAVHHIIKYRGNFLNGTPMRSFKVENIELDTLFDQLNQLYAEIVPDNELAFDLAQVADVKDVLSSTTIYKMDKKKQLVKMMLLPASNKALQSENKKIVTQFVNAILNYKFKLDVLLQVETDADWSLKLNDEGADDKLEEFTGDLDENRLEIIDLLQRLHNWFSLNEITKDGNSLSAAMVEKYENHHHHLGLLKKVIENHPDAKKAKALKETYTAYVGKTDDKTQNQDDFYKAVEKNLDDSPDAKEIKRLIQLDQFMPKQRTGQNGAIPHQLHQQELDQIIEKQSKYYPFLAEPNPNVKRRKDAPYKLDELIAFKIPYYVGPLVTPEEQAQNKENVFAWMKRKAAGPITPWNFDEKVDRMESANRFIRRMTTKDTYLFGEDVLPAESMIYQKFVVLNELNNLKINGRHLSLKDKQDVYNDLFKQQKTVSIKALQNYYVTKKKAATAPTVGGLADPKKFLSSLSTYIDFKNMFGERVNDPQFQEDLEQIVEWSTIFEDRGIFKAKLQALGWLSEKQIQQLVAKRYKGWGRLSKKLLTGLKNAEGYSILDEMWRSTENFMQIQTRPEFAALIQQANEKQFEGNDPNNVWENIESILGDAYTSPQNKKAIRQVVKVVQDIEKAVGNPPEKIAIEFTREAAANPQRTQSRLRTLEKLYESAEEVVDAGLTAELAEFKENKHVLSDKYYLYFTQLGRDVYTGDTISLDKLNDYDVDHILPQSFIKDDSLDNRVLTIRAVNNGKSDNVPAKMFGKKMGSFWRYLLDNGMISKRKYNNLITDPDNISKYAQKGFINRQLVETSQVIKLTANILNGIYDKDTEIIEVPAKMNSQMRKMFDLVKVREVNDYHHAFDAYLTIFIGKYLYKCYPKLRPYFVYGKFKKFGDNEDIEVGDGRFNFLNRIERLKNVTDPETGEILWSNVAPNETIKQIKKVYNYKFMLVSRETTTRRAELFNQTVYPKNYRGKLIPIKEDRPTDLYGGYSGNTDAYLAIVALEDKKKGKYFKVVGIPTRAAAKLEKLKQQDSQQYLQALHKVIAPQFTKSTKKGIKKTEFEIVLDKVHYRQLVQDGPVKMMLGSSTYKYNAKQLVLSEKALQVIADDRKFDETQKDDNLIAVYDEILSIVNQSFDLYDINGFRKKLNDNRDQFIDLPAETKYEGRKVVAHGKREMILEILKGLHANAAFGNLKPIGFSTAFGQLQVPNGIILSKNAILIHQSPSGLFERKIKLSDL

SEQ ID NO: 582 - protein, 1229 aa, Pediococcus acidilactici; identical to SEQ ID NO: 125

SEQ ID NO: 583 - protein, 270 aa, Pediococcus lolii
LFNQTIYSAKASKTMIPIKNDRPTKLYGGYSGNEDAYMSIIRLSDKKKTYKVVGISMRDASKLKAYENNAHEEYLKKLKEVIEQQFLDSGKKTKADFEIVIPKVNYHQRMQDGTKQFRIGSSKYVHNTKQLVLSEKTLKAIRNNKQYNGDAEKDLINAFDEILTIVNDSFSIFDIRSFRKKLNESRDKFVSLPVEDTKEKSKVIKGKRETLKQILIALHANGTSQDIPQLGLKSFGKMVKTGGLTLSENTALIHQSPSGLFEHKIKLSDL

SEQ ID NO: 584 - protein, 1016 aa, Pediococcus lolii
MNGIFDAHLAEVDPTFLARLKESNRSNLDPKKSFQGSLLFPERKDYQFYKEYPTIYHLRKALMEKDRKFDIREIYLAVHHIIKYRGNFLNGTPMRSFKVENIELDTLFDRLNQLYEEIIPDNELAFDLEQVADVKEVLSSTTIYKMDKKKQLVKMMLLPASNKALQSENKKIVTQFVNAILNYKFKLDVLLQVETDADWSLKLNDEGADDKLEEFTGDLDENRLEIIDLLQRLHNWFSLNEITKDGNSLSAAMVEKYKDHRHHLELLKKVIEDHSDAKKAKALKETYTAYVGKTDDKTQNKDDFYKAVEKNLDDSPEAKEIKRLIQLDQFMPKQRTGQNGAIPHQLHQQELDQIIEKQSKYYPFLAEPNPNVKRRKDAPYKLDELIAFKIPYYVGPLVTPEEQAQNKENVFAWMKRKAAGPITPWNFDEKVDRMESANRFIRRMTTKDTYLFGEDVLPAESMIYEKFVVLNELNNLKINGRHLSLKDKQDIYNDLFKQQKTVSIKALQNYYVTKKKAATAPTVGGLADPKKFLSSLSTYIDFKNMFGERVNDPQFQEDLEQIVEWSTIFEDRGIFKAKLQALGWLSEKQIQQLVAKRYKGWGRLSKKLLTGLKNAEGYSILDEMWHSTENFMQIQTRPEFAALIQQANEKQFEGNDPDNVWENIENILGDAYTSPQNKKAIRQVVKVVQDIEKAVGNPPEKIAIEFTREAAANPQRTQSRLRTLEKLYESAEEVVDAGLTAELAEFKENKHVLSDKYYLYFTQLGRDVYTGDTISLDRLNDYDVDHILPQSFIKDDSLDNRVLTIRAVNNGKSDNVPAKMFGKKMGSFWRYLLDNGMISKRKYNNLITDPDNISKYAQKGFINRQLVETSQVIKLTANILNGIYDKDTEIIEVPAKMNSQMRKMFDLVKVREVNDYHHAFDAYLTIFIGNYLYKCYPKLRPYFVYDNFKKFGNKEDIGHKRFNFLGKIERDKKVVAPETGEILWSNVAPNETIKQIKKVYDYKFMLTSHETYTKHG

SEQ ID NO: 585 - protein, 1333 aa, Planococcus antarcticus
MKNYTIGLDIGVASVGWVCIDENYKILNYNNRHAFGVHEFESAESAAGRRLKRGMRRRYNRRKKRLQLLQSLFDSYITDSGFFSKTDSQHFWKNNNEFENRSLTEVLSSLRISSRKYPTIYHLRSDLIESNKKMDLRLVYLALHNLVKYRGHFLQEGNWSEAASAEGMDDQLLELVTRYAELENLSPLDLSESQWKAAETLLLNRNLTKTDQSKELTAMFGKEYEPFCKLVAGLGVSLHQLFPSSEQALAYKETKTKVQLSNENVEEVMELLLEEESALLEAVQPFYQQVVLYELLKGETYVAKAKVSAFKQYQKDMASLKNLLDKTFGEKVYRSYFISDKNSQREYQKSHKVEVLCKLDQFNKEAKFAETFYKDLKKLLEDKSKTSIGTTEKDEMLRIIKAIDSNQFLQKQKGIQNAAIPHQNSLYEAEKILRNQQAHYPFITTEWIEKVKQILAFRIPYYIGPLVKDTTQSPFSWVERKGDAPITPWNFDEQIDKAASAEAFISRMRKTCTYLKGQEVLPKSSLTYERFEVLNELNGIQLRTTGAESDFRHRLSYEMKCWIIDNVFKQYKTVSTKRLLQELKKSPYADELYDEHTGEIKEVFGTQKENAFATSLSGYISMKSILGAVVDDNPAMTEELIYWIAVFEDREILHLKIQEKYPSITDVQRQKLALVKLPGWGRFSRLLIDGLPLDEQGQSVLDHMEQYSSVFMEVLKNKGFGLEKKIQKMNQHQVDGTKKIRYEDIEELAGSPALKRGIWRSVKIVEELVSIFGEPANIVLEVAREDGEKKRTKSRKDQWEELTKTTLKNDPDLKSFIGEIKSQGDQRFNEQRFWLYVTQQGKCLYTGKALDIQNLSMYEVDHILPQNFVKDDSLDNLALVMPEANQRKNQVGQNKMPLEIIEANQQYAMRTLWERLHELKLISSGKLGRLKKPSFDEVDKDKFIARQLVETRQIIKHVRDLLDERFSKSDIHLVKAGIVSKFRRFSEIPKIRDYNNKHHAMDALFAAALIQSILGKYGKNFLAFDLSKKDRQKQWRSVKGSNKEFFLFKNFGNLRLQSPVTGEEVSGVEYMKHVYFELPWQTTKMTQTGDGMFYKESIFSPKVKQAKYVSPKTEKFVHDEVKNHSICLVEFTFMKKEKEVQETKFIDLKVIEHHQFLKEPESQLAKFLAEKETNSPIIHARIIRTIPKYQKIWIEHFPYYFISTRELHNARQFEISYELMEKVKQLSERSSVEELKIVFGLLIDQMNDNYPIYTKSSIQDRVQKFVDTQLYDFKSFEIGFEELKKAVAANAQRSDTFGSRISKKPKPEEVAIGYESITGLKYRKPRSVVGTKR

SEQ ID NO: 586 - protein, 211 aa, Porphyromonas catoniae
MGKKVLGLDLGVGSIGWCLITLDKDEKPQSILGMGSRIVPLSADDATEFTQGKAITKNKMRTVARTIRKGMDRYQLRREALKKVLREHAMLPDEALIKLPLLELWELRARAATPGEQVSLTELGRVLLHINQKRGYKHAKADEAAEAETKKGKETGYVAQVKGRYQILKEKGLTIGQHFAGELRANQQTAPRGTYYTYRIKEQVYPRVRGV

SEQ ID NO: 587 - protein, 1009 aa, Porphyromonas catoniae
MRIIREAYIEEYDRIMAVQRVFYPELLTDALIGRIRDRIIFYQRPLKSCKQLVSFCEFEKKEKVIRVKHTNKEGVQELVEKTITIGPKVAPKSSPIFQVCKVWESIHNIRLYHPDGTERKLEQEEKQKLFDYLQRNDKLSLTTLRKELKIKPKDKLWCDKLLEKGIAGNTTAAILRKAFKGYEHYERLFRFDLVRRDSHEADEDGVIRPIIDESYQNEPLYKLWHILYSIEDRAEMRSALIGQLGIKAEDLDNGLMDALYKIDFVKQGYGNKSAKFICKLLPHLQEGKMYSEAAEAAGMRHSDSMTAQERDERNLLEEIPLLQKNALRQPVVEKVLNQMINLVNALKREHGEIDEVRVELARELKMSREEREKATKNNSSREKENKAIAERITEYGLTPTKSRIQKYRLWQESAESCIYCGKRVDVVQFLRGEETEVEHIIPKSILFDDSLSNKACACRSCNQEKGNRFAMEYIQAKGWEQDYIERVDSLFHDKKISYSKRQHLLMLPKDLPEDFIERHLRLSQYISREAQGILRKGIRLVSASEGGVTAKLRQLWGYDNILRDLNLERYKSMGETEVVTVEHRDGQRTDERIKDWSKRKDHRHHAIDALVVACTRQSYIQRLNRVNAEADRQEMDAFIKEQQQEHKLSKKEKLSLLENWLKEQPHFTTGEVKEHAEGILISFRPGKRTVSRGRNIYKRSGKTDVQRNVLIPRGALSEETVYGVISVDGENKVVCKYPLQKFLDTKETNVDKIADQAAEKIVDKVLREKIRERIKRYGKKEAFAEPLYLDEAQTQVVRSVRCFISKDQAKLIPLRYNDESEAVGFVAPGNNHHLALYRDASGKMRASVVSFFAAVERARYGIPMIVLNPRETREKARIIPDLPESIFSKLPEEDWVLEETLQEGEMVLLGMENDAIEEAIKKKDYSKLSRYLYRVQSLSYNDYKFCFHLETESEKKEKKKGEDKKRGEKAKNTAVMPPKRYRIRCLATYQEDLNPRKVKIDLLGRISLA

SEQ ID NO: 588 - protein, 1197 aa, Porphyromonas sp.
MLMSKHVLGLDLGVGSIGWCLIALDAQGDPAEILGMGSRVVPLNNATKAIEAFNAGAAFTASQERTARRTMRRGFARYQLRRYRLRRELEKVGMLPDAALIQLPLLELWELRERAATAGRRLTLPELGRVLCHINQKRGYRHVKSDAAAIVGDEGEKKKDSNSAYLAGIRANDEKLQAEHKTVGQYFAEQLRQNQSESPTGGISYRIKDQIFSRQCYIDEYDQIMAVQRVHYPDILTDEFIRMLRDEVIFMQRPLKSCKHLVSLCEFEKQERVMRVQQDDGKGGWQLVERRVKFGPKVAPKSSPLFQLCCIYEAVNNIRLTRPNGSPCDITPEERAKIVAHLQSSASLSFAALKKLLKEKALIADQLTSKSGLKGNSTRVALASALQPYPQYHHLLDMELETRMMTVQLTDEETGEVTEREVAVVTDSYVRKPLYRLWHILYSIEEREAMRRALITQLGMKEEDLDGGLLDQLYRLDFVKPGYGNKSAKFICKLLPQLQQGLGYSEACAAVGYRHSNSPTSEEITERTLLEKIPLLQRNELRQPLVEKILNQMINLVNALKAEYGIDEVRVELARELKMSREERERMARNNKDREERNKGVAAKIRECGLYPTKPRIQKYMLWKEAGRQCLYCGRSIEEEQCLREGGMEVEHIIPKSVLYDDSYGNKTCACRRCNKEKGNRTALEYIRAKGREAEYMKRINDLLKEKKISYSKHQRLRWLKEDIPSDFLERQLRLTQYISRQAMAILQQGIRRVSASEGGVTARLRSLWGYGKILHTLNLDRYDSMGETERVSREGEATEELHITNWSKRMDHRHHAIDALVVACTRQSYIQRLNRLSSEFGREDKKKEDQEAQEQQATETGRLSNLERWLTQRPHFSVRTVSDKVAEILISYRPGQRVVTRGRNIYRKKMADGREVSCVQRGVLVPRGELMEASFYGKILSQGRVRIVKRYPLHDLKGEVVDPHLRELITTYNQELKSREKGAPIPPLCLDKDKKQEVRSVRCYAKTLSLDKAIPMCFDEKGEPTAFVKSASNHHLALYRTPKGKLVESIVTFWDAVDRARYGIPLVITHPREVMEQVLQRGDIPEQVLSLLPPSDWVFVDSLQQDEMVVIGLSDEELQRALEAQNYRKISEHLYRVQKMSSSYYVFRYHLETSVADDKNTSGRIPKFHRVQSLKAYEERNIRKVRVDLLGRISLL

SEQ ID NO: 589 - protein, 1422 aa, Prevotella denticola
MTQKVLGLDLGTNSIGSSVRNLDLSDDLKGQLEFFSSDIFRSSVNKESNGREYSLAAQRSAHSRSRGLNEARRRKLWATLDLLIKYGFCPMSPESLMRWRTYDKQRGLFREYPIDDKNFNAWILLDFDGDGKPDYSSPYQLRRELVIRQFDFDQPIERYKLGRALYHIAQHRGFKSSKGETLSQQETNSKQSLTDDTADVAGEMKASEEKLSKGLSTYMKENNLLTVGAAFAQLEDEGVRVRNNNDYRAIRSQFQREIETIFKFQQGLSVENELYERLVSEKKNIGTIFYKRPLRSQRGNVGKCTLERTKPRCAIGHPLFEKFRAWTLINNIKVRMSEEEQAEQLPMKLRFELYNDCFLAFVRAEFKFEDIRKYLEKRLGVHFSYNDKTINYKDSTSVAGCPITARFRKLLGEDWESFHVDGQKQRQAHGKNNASFHTVSYSTNDIWHFCYDAEEPEAVLSFAQDNLKWEKKKAEELVRIWSAIPQGYAMLSQKAIRNINKMLILGLKYSDAVLLAKVPEIVEITDGEILSVTEDYHRVEAQVGYEKQINNIVNALIAKYKSASEEYRFADHNYEYQLDKSDEKDIIKQIESNIGTRKWSLLDADEQTDILQKVRDKYQNFFRSHERKFVESPKLGECFEEYLMKKFPMVEGERWKKLYHPSQIAIYRPVPANKDRSALRLGNPDIGAIKNPTVLRVLNTLRKRVNQLLDDGIISPDETRVVVETARELNDANRKWALDTYNRIRHDENEKIKKILAEFYPKRDNISTVDIDKARYVIDQREMDYFTEAKTYHKDIKKYKLWLEQGGQCMYTGRTINLSNLFDPNSFDVEHTIPESISFDSSDMNLTLCDAHYNRFIKKNHIPADLPNYDKSVVIDGKEYSPIKPRLQRWADRVERLNRNVEYWRGQARRAQNKDRKDQCMREMHLWKMELEYWTKKLERFTITEVTDEFKNSQLVDTRVITRHAVLYLKSIFPHVDVQRGDVTAKFRKILGIQSVDEKKDRSLHSHHAIDATTLTIIPGAAKRERMLELFAKIEEVNKMLSFSGNEDRTGLKQELDGLKNQLNKEVKACRIGHNVSEIGTFINDNIIINHHVKNQALTPVRRRLRKRGHIVGGMDNPRWQTGDALRGEIHKASYYGAITQYAKDKEGKVLMKEGRPQINPTIKFVIRRELKYKKSSTDSGFASWDDLGKAIVDKELFALMKGQFPEGTSFKDACEQGIYMIKKGKNGEVDTKLYRIRHIRCKTKQKNALKIKEQAYKSEKEYKRYFYAAVGDLYAMCCYTNGKTREFKIYSLYDISCHRKVGVEDIPEFITDKKGNRLMLDYKLHTGDMILLYKENPEELYDLDNVSLSKLLYKINGFENDGLRIRMVNHLVAKEAMGESVKDYAKLPDIIRCGVKTIKFLVMGENRDFVIKNGKISFNHR

SEQ ID NO: 590 - protein, 443 aa, Prevotella disiens
MELDYWKGKYNRFTMTEIPEGFSRRQGMGIGLISRYAGLYLKTIFHKKDNPQKSNVYIVKGSITAEFRRIWNIQDDYEKKCRDNHIHHCIDAIVVGCIGKREYDLMAQFYRDEEKYRWEKKKKPFFKKPWETFTQDMLSLKDEVLTVHFNPSNFTKKAHKKVFTPKGIFVAQGDCARVKLHKESYFGAIEQKGEIKYVMRKELSALKIEDIKNIVDAVVKEKVLAVVKKKGFKQAMAEPIYMNEDKRILIKKVRLFVSQTNPLIVKKHRDLSSKEYKQNYYVDNEGNLMIAMYEGVKKNGKIDREITVVNNLEAAKFFRQSQKNNAEKQLISHLSPKNGYPLKTVLTQKQLVLMYEDSPKEIKLRDTKNMVKRLYQVVEIEKDGRVKLKFHQEARSEGLNKNSAAFKIQDTPESLYRHTKSNLKVLVNGVDFKINILGEISLI

SEQ ID NO: 591 - protein, 1375 aa, Prevotella histicola
MKKILGLDLGTTSIGWALVYESENTDEKSSIVRLGVRVNPLSVDEKGNFEKGKAITTNADRQQTHGARINLQRYKLRRENLKDCLQKQGWIGTEALCEEGKTSTFETYMLRAKAAEEEISLHELCRVLFMMNKKRGYKSNRKANNKEDGKLFDGMTVAKKLYEEHLTPAEYSFQLLSSGKKFKQEYYRSDLKEEFDRIWNEQQKYYPEILTDDFKQQLQGKSKGNTSKIFLGKYGIYSADLKGLDRKLQPLKWRVEALKQQVDKEVLAFVISDLNGQIASTSGLLGAISDRSKELYFNKQTVGQYLWTSLKETPHVSIKNKPFYRQDYLDEFEKIWETQATYHKELTPELKQEIRDIIIFYQRPLKSKKGLISVCELEQRKVKVTIDGKEKEISIGPKVAPKSSPMFQEFRIWQNLNNILLIDKGNNSIHPLYEEEKNLLYEELSVKEKLSKAEALKVLNKNSKQWDLNYKEIEGNRTQAVLYDCYNRIIVMTGHEEYNFKKLKASEIRSYVKTTFTGLGFNTDILEFDSSLTGHELEKQPMYQLWHLLYSYESDNSRTGNDALLRKLETAFGFPKEYAAVLSDVVFEDSYGNLSVKAMRKILPHLQAGLNYSQACEEAGYKHSRRSLTKNELDQKEYKEKLELLPKNSLHNPVVEKILNQMINVINAVIDEYGKPDEIRIELARELKIGAAERENMTRSINQGNAENKRIREILEKEFALSYISRNDIIKYKLYEELKSNGFKTLYSDTYISKDKLFSKDFDIEHIIPKARLFDDSLSNKTIEARDVNIAKSNKTAFDFISEKYDQQGIEAYKKKLDILLQDGSISKAKYNRLLMKEADIPSGFIDRDLRDTQYIAKKAYEILSDLVRNVTPTTGAVTSRLREDWQLVDVMKELNFEKYQKLGLVEVIEDRDGRKIKRIKDWTKRNDHRHHAMDALTIAFTKPSYIQYLNNLNARSDKNSSIYGIENKELHREDNKLRFNAPLPINEFRAEARRHLKSILVSVKAKNKVMTQNVNVIKTKHGVIKKVQLTPRGELHNATFYGTKKRPIIKMVKVGAALDEVTIKKVSSSFIREALLDRLHEYNGDAKKAFTGRNSIDKNPIYIDEEHKKTVPALVKTIEWEMYHPTRKLISPDLKIDKVIDKGIREILKTRLAKFNGDAQKAFSNLDENPIYKDEAKKITLKRVSLEGVSSVIPLHTLKDREGKLVVGKDGKPVLGDYVQTSNNHHIAFYMDENGNLQDNVVSFFEAAERKSQGVPVIDKNYNHDKGWNFLFTMKQNEYFVFPNEVTGFNPSEVDLMDEANYSIISPNLYRVQKMSKASGRDYWFRHHLEAMLNDDPKLRNSMFKRITSLKALEGIVKVRINCIGKIVAVGEYD

SEQ ID NO: 592 - protein, 1380 aa, Prevotella intermedia
MKRILGLDLGTTSIGWALVNEAENNNEASSIVRLGVRVNPLTVDEKSNFEKGKAITTNADRQLRHGARINLQRYKLRRQNLHDCLQKQGWLGTEAMYEEGKASTFETYKLRAKAAEEEISLHEFARVLFMLNKKRGYKSNRKANNKEDGQLFDGMTIAKKLYEEHLTPAEYSLQLLNKGKKFTQGYYRSDLNAELERIWDEQKKYYPEILTDEFKQQLEGKTKTNTSKIFLAKYGIYSADLKGLDRKFQPLKWRVEALQQQVDKEVLAFVISDLKGQIANTSGLLGAISDRSKELYFNKQTVGQYLWASLEENPHISIKNKPFYRQDYLDEFEKIWETQAAFHKQLTPELKQEIRDIIIFYQRPLKSKKSLISVCELEQRKVKATIDGKEKEITIGPKVAPKSSPVFQEFRIWQNLNNVLLIDNDTNEKRPLDEVERNLLYKELSIKAKLSKTEALKILNKKGKQWDLNYRELEGNRTQAILFDCYNRIITLTGHEECDFKKIKASEIRHYVSTIFKNLGFSTEILDFDPSLKKHELEKQPMYQLWHLLYSYESDNSRTGNESLLRKLETTFGFPEEYATVLCDVVFEEDYGNLSVKAMREILPYLQAGNDYSQACAYAGYNHSRHSLTKEELDQKVYKERLELLPKNSLRNPVVEKILNQMINVINAIIDEYGKPDEIRIEMARELKSSAADRKKTTHAISQGNAENQRIREILEKEFSLSYISRNDIIKYKLYEELEPNYYKTLYSDTYITKDKLFSKDFDIEHIIPKARLFDDSFSNKTLEARNINLEKSNKTAFDFIKEKYGEDGAEAYKKKLDMLLENDAISRPKYNNLLRAEADIPSDFINRDLRNTQYIAKKACEILGELVKTVTPTTGKITNRLREDWQLVDVMKELNFEKYEKLGLTEIVEDRDGRKIKRIKDWTKRNDHRHHAMDALAIAFTKPSFIQYLNNLNARSNKGDSIYAIENKELHYEEGKLRFNAPIPVNEFRAEAKRHLSAILVSIKAKNKVMTQNVNKIKTKHGIIKKIQLTPRGPLHNETIYGTKMRPIIKMVKVGAALDEATINKVSSPAIREALLKRLNEYSGNAKKAFTGKNTLEKNPIYLNAGRTKTVPSLVKTVEWESFHPTRKLIDKDLNVDKVVDKGIREILKARLEEFNGDAKKAFSNLEENPIYLDEAKKIALKRVSIEGVLSAIPLHTLKNQAGKPITGKDGKPVLGNYVQTSNNHHIAFYYDEDGNLQDNAVSFFEAAERKSQGIPVIDKDYNRDKGWRFLFTMKQNEYFVFPNEATGFIPSEVDLTDEANYGIISPNLYRVQKVSRIDKGTSASRDYWFRHHLETILNDDAKLKNLAFKRIRGLLELKDIIKVRINSTGKIVAVGEYD

SEQ ID NO: 593 - protein, 129 aa, Prevotella multiformis
MQKGGTGCKINRQTVGNVEVNVLNLRLYDRTDDREVTAGYLPTKEDYVRLFVYLNDRKEINQDTLLKDYFRLKKVKCGNEKEFAIRWNYIEDKEKKYPCNETRHELLAALDRAGMEHGWLDDSGTSARW

SEQ ID NO: 594 - protein, 535 aa, Prevotella multiformis
MVKGLLSNIVRTAEEREETSKFVISCTGRITDRLKQDWGLNDVWNSLVYTRFKRLNELTETEAFGHWQDKDRRVFQTSVPLELQRGFSKKRIDHRHHAMDALVIACASRNIIGYLNNESAESPEKREDLRRKLCDKNHIIRKPWESFTQDARAALEDIVVSFKNYVRIINKATNYYERYDADGRKTKAEQKGGEMWAVRKPMHEATYYGKVNLRRKERVSLKAALEDIPSICNRDLRDYINGLVEKHFNKEQVLAQFRSVGNRWNKQHIDKVDVWRFSDGKEEMVATRKPLDTSFDAKRIEAVTDTGIQRILSNYLEAKGGDPKIAFTPEGIADMNQHITAYNNGKQHKPILKVRVSTKLGKKYPVGQTGCKAGQFVVAEAGTNLYFAVYEDGEGNRSYDTIPLNEAVECLKQGLPPVPETREKGDRLKFYLSPNDLVYVPAGDEENEIDRERIYKFVDSSGTTANFIPHRTAGLIYNVDKKLAEALCNGSIIQNEYGVGSQQSKNQKALTGEMVKAVCWKLEVDRLGNILRIIK

SEQ ID NO: 595 - protein, 1380 aa, Prevotella nigrescens
MKRILGLDLGTTSIGWALVNEAESNNEASSIVRLGVRVNPLTVDEKSNFEKGKAITTNADRQLRHGARINLQRYKLRRQNLHDCLQKQGWLGTEAMYEEGKASTFETYKLRAKAAEEEISLHEFARVLFMLNKKRGYKSNRKANNKEDGQLFDGMTIAKKLYEEHLTPAEYSLQLLNKGKKFTQGYYRSDLNAELERIWDEQKKYYPEILTDEFKQQLEGKTKTNTSKIFLAKYGIYSADLKGLDRKLQPLKWRVEALKQQVDKEVLAFVISDLKGQIANTSGLLGAISDRSKELYFNKQTVGQYLWASLEENPHISIKNKPFYRQDYLDEFEKIWETQATFHKQLTPELKQEIRDIIIFYQRPLKSKKSLISVCELEQRKVKATIDGKEKEITIGPKVAPKSSPVFQEFRIWQNLNNVLLIDNDTNEKRPLDEDERYLLYKELSIKAKLSKTEALKILNKKGKQWDLNYKELEGNRTQAILFDCYNRIITLTGHEECDFKKIKASEIRHYVSTIFKNLGFSTEILDFDPSLEKHELEKQPMYQLWHLLYSYESDNSRTGNESLLRKLETTFGFPEEYATVLCDVVFEEDYGNLSVKAMRKILPYLQAGNDYSQACAYAGYNHSRHSLTKEELDQKVYKERLELLPKNSLRNPVVEKILNQMINVINAIIDEYGKPDEIRIEMARELKSSAADRKKTTHAINQGNDENQCIREILEKEFALSYISRNDIIKYKLYEELKPNGFKTLYSDTYIPKDKLFSKDFDIEHIIPKARLFDDSYSNKTLEARDINLAKSNKTAFDFVKEKYGEQGAEAYKKKLDMLLGNNVISKPKYNKLLMTEADIPSDFINRDLRNTQYIARKACEILGELVRTVTPTTGKITNRLREDWQLVDVMKELNFEKYEKLGLTEIVEDRDGRKIKRIKDWTKRNDHRHHAMDALAIAFTKPSYIQYLNNLNARSNKGDSIYAIENKELHYEEGKLRFNAPIPVNVFRAEAKRHLSAILVSIKAKNKVMTQNVNKIKTKHGIIKKIQLTPRGPLHNETIYGTKMRPIIKKVKVGAALDEATINKVSSPAIREVLLKRLNEYSGNAKKAFTGKNTLDKNPIYLNAERTKTVPASVKTVEWENYHPIRKPITPDLKVDKVIDKGIGEILKARLEEFNGDAKKAFSNLEENPIYLDQTKKIALKRVSIEGVLSTIPLHTLKNQAGKPIMGKDGKPVLGNYVQTSNNHHIAFYYDEDGNLQDNAVSFFEAAERKSQGISVIDKDYNRDKGWRFLFTMKQNEYFVFPNEATGFIPSEVDLTDEANYGIISPNLYRVQKMSRIEKGTSVSRDYWFRHHLETILNDDSRLKNSAFKRINSLKPLEGIIKVRINSIGKIVAVGEYD

SEQ ID NO: 596 - protein, 1506 aa, Prevotella nigrescens
MKTILGLDLGPNSIGWAKVEVDDEGNYLRNIKLGSRIIPMTQDMLGDFDKGVKVSQTAIRTDFRGNRRLIERHLLRRERLHRVLHALKFLPKHYEDAIGWDRNEPATYGKFVNNSEPKLAWERQEDGSMRFLFMESFNEMVADFAQNQPSLVSDGKKIPLDWTIYYLRKKALTRPIKKEELAWILLNFNQKRGYYQLRGEEEEDNLTKRKEYYKLKVVGVEADGAPKGGKTWYNIHLENGWTARCQSKIPLDDWVGKVKEYIVTTEYEDDGKTPKCDKEGKVKRSFKSPEKDDWQLIKTRTEKFIDDSNKTVGAFIYDYLLEKPFDKIRGKYIRTIERKYYKNELREILREQTKYHEGLHSLEALKICAEELYKNNQQHQEYLLKKDMTFLLLNDLIFYQRPLKSKKSLIADCPYEVYKYDDKLTGKKGQKKIKCIAKSNPYYQEFRLWQFIANLRLFSVTDGKEVTAEYLKTEEDYVRLFSFLNDRKDIKQETFLRSFLKLKKESIGSEKIYPIRWNYIEDANKSYPCNATRHELLLAFDRADIPRELLDVEEREYRLWHLLYSIEAKEETESALRKLKANKAFGDLNIDDAFVNSFLKIKPFEKEYGAYSEKAIKKLLAVMRRGSLWKEADICEATKQNIAKILQNDIDEKLKKKIEAAVSSFNKLSDFQGLPTWLACYVVYGRHSEAAQIQCWQSPEDLKTYINKFKQHSLRNPIVEQCLLETLRTVYDIWKDAGQIDEIHIELGRNMKSTAEQRARKTKDILRNENTNLRIKNLLVELKNDDKIENVRPYSPSQQEILRIYEEGALQELSKEDEMFEDISKISKMAQPSPTELSRYKLWLEQKYRSPYTGRVIPLSKLFTTAYQIEHIIPQSRYFDDSFNNKVICESEVNSLKDNMLGYEFIKECGGRIVHCTLLGDVKIFTKEEYKDFVTKHYIDNTYKRDKLLLEDIPQEFSARQLNDSRYISKMVQTVLSNIVRAENEQEATSKFVVSCNGAITNRLKKDWGLNDVWSSIVCPRFKRLNEITKTNAFGHWEDKAGKHVFQTTVPLELQRGFSKKRIDHRHHAMDALVIACASRNIVNYLNNESANSPEKREDLRKKLCDEKRKIRKPWKTFTQDAREALSDVVVSFKNYVRVINKATNYYEHYSSSGNKVMISQKGNDMWAIRKPLHKESVFGRVNLCRKVIVSLKKALENIPAICDKTLRDYINALVEKHFNTRQLLAHFKSINYRLNRQCVEKVEVWQFSDEKIEMVARRKSLDTSFDDKQISSITDTGIQKILLNYLQTKDGNAEIAFTPEGIEEMNKNISLYNDGKAHQPILKVRVATPKGMKYPVGQTGNKATKFVVAEKGTNLYFAIYENELGVRSYDTIPLNIVVERLKEGLSPVPQANEADIPLKFYLSPNDLVYVPTKENEDELCRDRIYKFVDSSGTTANFVPHTSANTIYNVDKEYAEKCCNGAVFLNEYGLGSPQSKNQRALTGEMIKEICWKLKVDRLGNIIKVIK

SEQ ID NO: 597 - protein, 774 aa, Prevotella oulorum
MEQCILETLRTVYDIWKEAGQIDEIHVELGREMKQTAEQRAHLTEKVLRNENTNLRIKSLLMELKNDADMKDVRPYSPMQQEILRIYEEGALQTLSKDDAAFTEIMKISKMAQPSASELQRYRLWLEQKYRSPYTGKPISLSKLFTSAYQIEHIIPKKRYFDDSFSNKVICEAEVNGKKDSMLAYEFIKDCGGDVIHCTTLGDVTILSEAEYKALVTELYANNKSKKDKLLMEDIPQDFINRQLNDSRYISRVVMTLLSNIVRIEGEEEATSKFVIPCSGGITDKLKKDWGLNDVWNNIVYPRFERLNALTNTSDFGQWENKEGKRVFQTSVPLELQRGYQKKRIDHRHHAMDALVIACASRKIINYLNNQEANDPTKQENARKQLCIKSRIIRKPWETFTQDAYKALDNIVVSFKNYVRVINKATNYYERYNADGKKAVDEQKGEAMWAIRKPMHKDTVFGHVNLRRKAVVKLKDALENIPAICDKTLRHYIQDLQKKHFNTKQLLAHFKSINYRLNKQAVDKVEVWQYSDDKEQLAATRKPLGPSFDAKCIAAITDTGIQKILLNYLQAKGGDPAIAFTPEGIAEMNQNIAVYNGGKQHQPILKVRIAKPMGKKFPIGQTGNKAFQYVIAEEGTNLYFAIYEDEEGNRTYDTIALREVVERLKQGLTPVPEKNEKGVALKFHLSPNDLVYVPTADELLSKVCSLDKNRIYKMVSATKSECLFIPHSVAKTIYDKVEFEALNKMGRALTGEMIKSVCWKIEVDRLGHIVNIIK

SEQ ID NO: 598 - protein, 691 aa, Prevotella oulorum
MKTILGLDLGTNSIGWAKVIVDDNENYLRDIQLGSRIIPMSQDVLGKFDKGVTESQTAIRTSFRGVRRLRERTLQRRERLHRVLHTLHYLPPHYDSAIGWDRKTPTTYGKFLNHGEPKLAWERREDGTMQFLFMDAFHEMIADFAKYQPALVADGKKVPLDWTIYYLRKKALTQPIKKEELAWILLNFNQKRGYYQLRGEEDEENAAKHEEYHELKVVGVEVDEAGKGDNTWYNVKLENGWTYHRQSKIPLDDWVGKVRAFIVTTEYEKDGTTPKKDKEGNVKRSFRSPDEKDWGLRKKQTEHSLEASGTPVGAFIYDHLLKEPSDKIRGKFIHTIERKYYKQELAAILREQSKHHEKLCSKDMLKACIEELYPNNPLHRESLLKKDMPYLLIEDLIFYQRPLKSKKSLIAECPYEAYSYVDKETGEMKRQGIKCIAKSNPYYQEFRLWQLIANLRLRNRSDERDVTAEYLPHQEDYVRLFTYLNDRKEINQETLLKDFFKLKKVTIGGEKVFPIRWDYIEDKEKKYPCNATRHELLLALDRAGIEHDWLNDRDLAYRLWHLLYSVDSKDETERALRKLKDDDAFVESFLKIKPFEKEYGAYSEKAIKKLLPVMRRGSLWNEADLCPSTKERIANILQGTIDEKLKKKIGAFISSCQQVSDFQGLPEWLACYVVYGRHSEATDIQRWETPE

SEQ ID NO: 599 - protein, 242 aa, Prevotella saccharolytica
MKLVLGLDLGVGSVGWALIFITDSGEPIKILALGERIVSMDSNNSNEFSAGATCTLNQKKTKAKSVRKGYSRYVQRRDALTAELRHIGMMPDETLIKLPVLDLWQLRANAATEGKKLSLAEIGRVLYHINQRRGYKHGKSDVSSDNKQKGYVKAVNERYCMIQERQQTIGQYFALKLKETAVTTEKGTFYTFRIKDQVFPREAYEEEFVVAYSTKVLKFKQITTLLNVVICLMMLLLIVQRY

SEQ ID NO: 600 - protein, 1174 aa, Prevotella sp.
MEFHPELCDAELLKACAEELYRNNEAHRAQLLAKDFKHLLVEDVLFYQRPLKSKKSLIANCPYETRQYINKETGEIKDVNVKCIAKSNPYFQEFRLWQWISNLRLLRQADGQDVTAAYIKGNEDKERLFDLLNNQGEIKQEHILRDFLKLKKPKGGEFPLRWNYVDDKIYPANETRHAINKAIKGMAVDKEEKETLGQLLDQPAVAYMLWNLLYSITDRNELARALRRFALTHGVSSVDAFVESFLKVKPFKKEYGAYSEKATKKLLQVMRLGKYWCGDELPEPAKRTKGNKQAVYDEMAHRGICKQTLQNISNIIEENIDERLMGALLNPERPLTELSHFQGLSVSDACYVVYGRHSEVAEIVKWKDADELNTFINNFKQHSMRNPIVEQCVLETLRTVRDVWEQEGQIDEIHVELGRNMKRTAEQRARDTQAIQRNENTNMRISLLLTELKNDPSISDVRPYSPSQRELLKIYEEGALENLTNQDEDIAKISRLAQPSASELRRYKLWLDQKYVSPYTGRPIPLAKLFTPAYEIEHIIPQSRYFDNSFSNKVICEAEVNKLKDNLLGMEFIKKFGGKTKGILDEEAYKLHVTTNYAHNPAKRSKLLMEDLPTDFNSRQLNDTRYISKTVMALLSNVVREEGERETRSKHVVVCTGGVTDTLKKDWGLHDVWHNLVYPRFIRLNNLTGSQNFGYWRYLNEENSKKGEDSKKVFQITLPPECQRGFVKKRIDHRHHAMDALVIACASANIVNYLNNQSAANPHIHENLQRLLCDRKREIRKPWPTFTQDAQAALKDLVVSFKNTVRVVNKASNTYLRYDKDGKKKRFKQEGEGLKAIRKPMHKETYYGEVNLIRKEMVPLKRALDDVNAIVDKELRASIKGLLRDGFNPQQVLANFKAKDFKFDKRDIKKVEVYVSSEKSTPMVATRKSLDTSFNAKRIADITDTGIQKILLNYLKANDNSPEQAFTPEGIAYLNEHIAEYNDGKPHQPILKVRVSEVKGAKFAVGQTGSKKDKFVEAQSGTNLYFAIYEDKEGKRHFETIALKVAAERLKDKQMPVPEINDAGLPLKFYLSPNDLVYVPTDEDRATAHPSIDKMRIYKMVSATDRQCFFLPFTVASVISNKVEFEALNKMERVLDASEYSSAYDSSHVNKVMVKNVCWKLEVDRLGNITKIVR

SEQ ID NO: 601 - protein, 992 aa, Prevotella sp.
MITRILGLDTGTNSLAWAVVDRDANGNYTLVKRGDVIFTEGVKIEKGIESSKAAERTAHKALRVHYSRRRLHKIDTLKVLVELNLCPCLSDEQLSQWKAKKTYPLTDDFMLWQRSGSAEENNPYYCRHRCLTQKLDLTDQSQRFLLGRAFYHLAQRRGFLSNRLDTSADSDESGKVKSGIAQLSVEMEKAGCEFLGEYFYQLYKQHGNTIKLRSRYTDREEHYKKEFLAICEKQELDPKWVEALQRAIYFQRPLKSQRKGVGKCTFEPKKPRCAESHPDYEAFRMLCFLNNVKIQTPNDTSLRPLNEDEREKIWPIFFRKSKPNFDFEDIAKALAGKNNYAWYKDAGEKPFKFNYRMQQGVSGCPVTAQLIDIFGSDWQTAIAETYTAVEKKNGTKTIDEMADDVWNVLYSFSSKDKLKAFATEKLQLDEASATKFANAKLPHGFASLSLKAIRNILPFLRQGFIYAHAVHLAKIPDIVTKAVWNDADKREMILSGLMEIIENYNPKDRGVEGTIDFCIKSHLQDVIDLRPGAADALYHPSMIETYPDAKLNKMGVFQLGSPRTNAIRNPMAMRSLHILRSVVNQLLRDGIIDRDTEVHVEYARELNDANKRKAIADYQREQEKKRKQYRDDIIALYKSECHKEIEPTDTDILKFQLWEEQNHLCLYTGTQIGICDFLGDNPKFDIEHTVPRSVGGDSTQMNLTLCDATFNRQVKGAQLPSQLSNHADILVRIDHWKSKCEDLRKQLDKIRTYGGMEKNMKDRLIQKRHRLKMDLDYWQGKYSRFTMTEVPEGFSRRQGAGIGLVSKYAGLFLKSLFHNEQNPNKSNVYVVKGVTTAEFRRMWGLQGEYEKKSRLNHCHHCIDAITIACIGKAEYDKMAQYYHDEELFQWRGTTTKPHFNKPWPTFTEDVLAIEQSLLVKHLTKDNMPKQAKKRVRTATGKYLAQGDTARGSLHKDTYYGAIEQNGEIRYVLRKPLNKFENEAELEKIVDQA

SEQ ID NO: 602 - protein, 1375 aa, Prevotella sp.
MKKILGLDLGTTSIGWALVNESENKDEQSSIVRLGVRVIPLTVDEKGNFEKGKAITTNADRQQVHAARINLQRYKLRRENLRDCLQKQGWIGSEPMCEDGKSSTFETYKLRAKAAVEEVSLHEFARVLFMLNKKRGYKSNRKANDKEEGKLFDGMTIAKKLYEEHLTPAEYSLQLLNTGRKFTPEYYRSDLIEEFEKIWNEQQKYYPEILTDEFKQQLEGKAKSNTSKLFLGKYGIYSADTKGLDRRLQPLKWRVEAMKQQVDKDVLAFVISDLKGQIANTSGLLGAISDRSKELYFSKQTIGQYLWASLQENPHISIKNQPFYRQDYLDEFEKIWETQATYHKELTSELKQEIRDIIIFYQRPLKSKKNLIAVCELEQRKVKVTVDGKEKEITIGPKIAPKSSPMFQEFRIWQNLNNILLLDHETNSKRPLYEEERNLLYEELSVKEKLSKTEALKVLGKKSKQWDLNYKELEGNRTQAVLYDCYNRIIVMSGHEECNFKKLKASDIRHYVKMIFKNLAFNTDILCFDSSLKGHELERQPMCQLWHLLYSYEGDNSRTGNDALLRKLETSFGFPKEYAAVLADVIFEDSYGNLSVKAMRNILPHLQAGKDYSQACEEAGYKHSRRSLTKEELNQKVYKEKLELLPKNSLHNPVVEKILNQMVNVINAVIEEYGKPDEIRIELARDLKIGAAERENMTRSINQGNAENKRIREILEKEFALSYLSRNDIIKYKLYEELKSNGFKTLYSDTYISKDKLFSKDFDIEHIIPKARLFDDSLSNKTIEARDVNIAKSNKTAFDFILERYGEQGVKTYKTKLLRLLEDGAISNKKYNNLLKTEADIPSGFIDRDLRNTQYIAKKAYEILSELVKIVTPTTGSVTNRLREDWQLVDVMKELNFEKYQKLGLADVIEDRDGRKVKRIKDWTKRNDHRHHAMDALTIAFTKPSYIQYLNNLNARSDKSSSIYGIEVKELHREEGKFRFNAPLPINEFRAEAKRHLKSVLVSIKAKKKVMTQNVNKIKTKHGIIKKVQLTPRGELHNATYYGTKKRPLVRMVKVGAALDEATIKRVCSPAIRAALLKRLNAYNGDAKEAFTGRNSIDKNPIYLDIEQTKLVPVLVKTIEWGMYHPIRKRITPDLKIDKVIDKGIREKLKARLAEFNGDAQKAFSNLDENPIYMDEAKRITLKRVSIEGVLSAIPLHTLKDKAGKPVIGSDGKPVFGDYVQTSNNHHIAFYIDDKGNLQDNPVSFFEAAERKSQGVPVIDRRYNCDKGWHFVFTMKQNEYFVFPNEATGFIPSEVDLLDEANYCIISPNLYRVQKLSKASGRDYWFRHHLETMLNDDLRLKNSTFKRIQSLKGLEDIVKVRINSIGKIVAVGKYD

SEQ ID NO: 603 - protein, 1483 aa, Prevotella sp.
MKTILGLDLGTNSIGWAKVSVDDYGNYLHDIKLGSRIIPMSQDVLGNFDSGVTVSQTAQRTEFRSKRRLVQRNLQRRERLHRVLHVLDFLPAHYDAAIGWDRTEAVTYGKFLNHAEPKLAWEELGNGKRRFLFMDSFHEMVADFARCQPALVADGKKIPLDWTIYYLRKKALTQAITKEELAWILLNFNQKRGYYQLRGEEEEENPTKQEEYYELKVVSVEATDSRKGNDTWYNVHLENGWIYRRSSKISLDDWVGKVKQFIVTTEYEKDGTTLKTDKEGNVKRSFRAPNENDWGLRKKRTETLLEMSGKTVGAFIYDHLLQEPADKIRGNFIRTIERHYYKAELEAILAEQCKYHIELRDKEMLEACARELYLNNLPHQRSLMKKDMTYLLLYDLIFYQRPLKSKKALIANCPYEYYEYVDKETGEIKRQNIKCIAKSNPYFQEFRLWQFVLNLRLFDRVEDKEVTANYLPTADDHARLFTYLNDRKEINQETLLKDYFKLKKVKIGNEKEYPIRWNYIEDKEKKYPCNETRYELLMALDRAGIEHKWLDDNNLEYRLWHLLYSVEVKSESETALRKLKNDDAFVNSFLKVKPFKKEYGAYSEKAIKRLLAVMRKGFLWNEQDICDETRKRIEIIIKGDVDEKVKERMGHAAYSFDRVSDFQGLPEWLACYVVYGRHSEAMDIQRWDSPERLMAYINNFKQYSLRNPIVEQCILETLRTVHDIWKETGQIDEIHVELGREMKSTSEERARRTQNVLRNENTNLRIKSLLIELKNDTDICNVHPYSPMQQEILRIYEEGALQELNREDEDFEEISKISQMSQPSGKELNRYKLWLEQKYRSPYTGKAISLAKLFTPAYQIEHVIPQSRYFDDSFTNKVICEAEVNTLKSNLLGYEFIKKHGGEIIHCTTLGDVRIFSESEYKAFVMDHYANNKSKKDKLLMEDIPQEFLSRQMNDSRYISKVVKTLLSNIVRMADESEATSKSVIVCTGGVTDRLKKDWGLNDVWNSIVYSRFERLNRLTGTEAFGHWENKDGKRVFQTSMPLELQRGFRKKRIDHRHHAMDALVIACASRNIVNYLNNESANNPKKREDLRRQLCDKNRVIRKPWETFTQDAYNALENVVVSFKNYVRVINKATNRYEHYDENGKKRFVQQKGSELWAIRKPMHKETYYGHVNLRRKELVTLQKALDDIPSICDKKLRDYISALVEKHFNKRQLLAHFKSTDYYWQKQYVNKVYVWTFSDDIKPLVATRKLLDTSFDAKRIGTITDTGIQKILRNYLEAKGGNATLAFTPEGIVEMNQNISKYNDGKPHQPILKVRITEPMGAKYRVGQTENKMAKYVEAQSGTNLYFAIYEDSEGKRSYTTVPLDEVAERLKQRLSPVPEKDENDVPLKFYLSPNDLVYVPTEEELQLRECKLNKDRIYKMVSSTGSECHFIPYYVANVIYNKVEFEAKNKIGRALTGEMIKAVCWKLEIDRLGNILKVIK

SEQ ID NO: 604 - protein, 593 aa, Prevotella sp.
MNTRILGLDTGTNSLAWAVVDRDAKGNYTLVRRGDVIFTEGVNVDGQPVPSKAAVKSKYKSLRVQYARRRLRKIDTLKVLVSLDLCPYLSDQQLSQWKAKKTYPLTDDFMLWQRSGSAEENNPYYCRYRCLTQKLDLTDQSQRFLLGRAFYHLAQRRGFLSNRLDTTSDSAESGKVKSGIAQLSVEMEKAGCTFLGEYFYQLYKQHGNTVRLRSRYTDREEHYIKEFLAICEKQELDAQWVEKLQRALYFQRPLKSQRKGVGKCTFEPKKPRCAESHPDYEAFRMLCILNNIKIKTPKDVSLRPLNAEEREKVWPLFFRKSKPNFDFEDIAKALAGKNNYAWYKDAGEKPFRFNYRMHQGVSGCPVTAQLIDIFGSDWKAGIAETYTAVGKKNGTKTIDEMADDVWNVLYSFSSKDKLKAFATDKLQLDEARATKFANAKLPHGFAALSLKAIRNILPFLRQGFIYAHAVLLAKIPDIVTAAVWDDADKREQILSGLLEVIENYNPDDRGIEGTIDFCIKSHLQDVVDLRPGAADALYHPSMIEAYPDAKLNKMGVFQLGSPRTNAIRNPMAMRSLHILRSVVNLLLRDGMLS

SEQ ID NO: 605 - protein, 1424 aa, Prevotella sp.
MTQKVLGLDLGTNSIGSAVRNLDLSDDLQWQLEFFSSDIFRSSVNKESNGREYSLAAQRSAHRRSRGLNEVRRRRLWATLNLLIKHGFCPMSSESLMRWCTYDKRKGLFREYPIDDKDFNAWILLDFNGDGRPDYSSPYQLRRELVTRQFDFEQPIERYKLGRALYHIAQHRGFKSSKGETLSQQETNSKPSSTDEIPDVAGAMKASEEKLSKGLSTYMKEHNLLTVGAAFAQLEDEGVRVRNNNDYRAIRSQFQHEIETIFKFQQGLSVESELYERLISEKKNVGTIFYKRPLRSQRGNVGKCTLERSKPRCAIGHPLFEKFRAWTLINNIKVRMSVDTLDEQLPMKLRLDLYNECFLAFVRTEFKFEDIRKYLEKRLGIHFSYNDKTINYKDSTSVAGCPITARFRKMLGEEWESFRVEGQKERQAHSKNNISFHRVSYSIEDIWHFCYDAEEPEAVLAFAQETLRLERKKAEELVRIWSAMPQGYAMLSQKAIRNINKILMLGLKYSDAVILAKVPELVDVSDEELLSIAKDYYLVEAQVNYDKRINSIVNGLIAKYKSVSEEYRFADHNYEYLLDESDEKDIIRQIENSLGARRWSLMDANEQTDILQKVRDRYQDFFRSHERKFVESPKLGESFENYLTKKFPMVEREQWKKLYHPSQITIYRPVSVGKDRSVLRLGNPDIGAIKNPTVLRVLNTLRRRVNQLLDDGVISPDETRVVVETARELNDANRKWALDTYNRIRHDENEKIKKILEEFYPKRDGISTDDIDKARYVIDQREVDYFTGSKTYNKDIKKYKFWLEQGGQCMYTGRTINLSNLFDPNAFDIEHTIPESLSFDSSDMNLTLCDAHYNRFIKKNHIPTDMPNYDKAITIDGKEYPAITSQLQRWVERVERLNRNVEYWKGQARRAQNKDRKDQCMREMHLWKMELEYWKKKLERFTVTEVTDGFKNSQLVDTRVITRHAVLYLKSIFPHVDVQRGDVTAKFRKILGIQSVDEKKDRSLHSHHAIDATTLTIIPVSAKRDRMLELFAKIEEINKMLSFSGSEDRTGLIQELEGLKNKLQMEVKVCRIGHNVSEIGTFINDNIIVNHHIKNQALTPVRRRLRKKGYIVGGVDNPRWQTGDALRGEIHKASYYGAITQFAKDDEGKVLMKEGRPQVNPTIKFVIRRELKYKKSAADSGFASWDDLGKAIVDKELFALMKGQFPAETSFKDACEQGIYMIKKGKNGMPDIKLHHIRHVRCEAPQSGLKIKEQTYKSEKEYKRYFYAAVGDLYAMCCYTNGKIREFRIYSLYDVSCHRKSDIEDIPEFITDKKGNRLMLDYKLRTGDMILLYKDNPAELYDLDNVNLSRRLYKINRFESQSNLVLMTHHLSTSKERGRSLGKTVDYQNLPESIRSSVKSLNFLIMGENRDFVIKNGKIIFNHR

SEQ ID NO: 606 - protein, 241 aa, Prevotella sp.
QAVKEKIKEAIAGKNFKTAIAEPIFMNKEKGIRINKVRYYVKAQERLKIRQQRDLSSKEYKQFFCVENESNYLLAIYEGELKGKKERDFCVVNNLDSAACLKRSNKGKAAPLVPERSEERNLPLLAVLKRGTQVLFYENSPEEILFDNPQDLVRRLYKVTGINTKKDVKNGKTYLYGNIELRFHQNAQKKDDVKMQSGVYKNNEVLRQGIVLSHKQFKALVEGVDFEFNVLGEIKKKERHA

SEQ ID NO: 607 - protein, 1216 aa, Prevotella stercorea
MTKILGIDTGTNSLGWAIVDKTADNYNLLDKGVNIFQEGVKIEKGIESSKAAERTEHRATRVRYYRIKLRKIRLLRILSDNHLCPPLSQEELSTWRLKKVYPKNELFMQWQRTDDDTEKTPYAYRHKCIHEKLDLSDVTDRYILGRAFYHIIQRRGFLSNRKEQGGEDSGKVKEGISTLTHEMNEAGYEYLGDYFYALYNKGEKIRKHYTARNEHFLSEFKAICEKQDLEKELGSEVVRNIEKAIFDQRPLKSQKGQVGKCVFEKNKTKCPSSHPMYEEFRMLTFINNIKIKTPNDDVLRPLNTGEREKIMPLFFRKSKKQFDFEDITKKLAPKKMYGFYKKEEDAEMPFLFNYPMDTSVSGCPVTAALKDVFGDDWITAICETYTLGEGKSRFDIVNDIWHALYFYSDKDKLAEFAINRLQLSEDEAKIFSEISLPADYASLSLKAICKILPYLRRGLIYSHAVFLGNLCEVMPKYEWSIKEMRETIIDNIIMEMDKCDTKDKRTFEVCIKDYLKGQYNVSDNSLKKLYHPSMIETYPRVQYTNEHGVYQLGSPRIDSVRNPMAMRSMFRLRKLVNRLLVEGKIDQNTEVHIEFARELNDANKRNAIALFVKENQSANDEARKQIITLFKKETGTDIEPTDKDILKYVLWEEQNHICLYTGKQIRISDFIGANPKFDIEHTIPRSVGGDSTKMNLTLCDSRFNREVKKTKLPVELPNHDEIMERIKEWKKNYELLDIQIRKNKKLSKGATTKEQKDTIIRKRHLLELRRDYWRGKYERFTMESVPEGFSRRQGTDISVISKYARLYLKSLFNRVYTVKGIATSDFRKIWGIQDIYSKKERINHVHHCIDAIVIACIGLDEYNKLGAYYHDEENNKWYGMSKASFKKPWATFVEDIKKIQDEILVYHYTPDNMPKQGRRRIKIDGKKILCKGDAARGSLHNDTYYGAIENDGAVKYVKRIDLASLEEKDVKNIVDDTVRSIIEAAIKEKGFKDAMASTIWMNEEKRVPIKKVRCFTPSITKPLNIRKQRDVSIKEYKQQYHVANDSNYLLALYIGTDNKGKEKREFEIVNILQAAQYYRTSNDKEVVDRHIVPIKSEHDYPFAYTLKIGTMVLLYEKSPNEVWDATIKERNRRLYKVTGLSTMRMKGRNGEYAYATVKLIHNEEARPSKDIKAKNGEYEQGEEFRPAIIMLHTQLNALVQGYDFEINELGEIRRLR

SEQ ID NO: 608 - protein, 1487 aa, Prevotella timonensis; identical to SEQ ID NO: 130

SEQ ID NO: 609 - protein, 770 aa, Pseudoramibacter alactolyticus
MAKGYFASDEEIDFSGVDDGFKNTLSSHQKFKEIFDVEVLNDWQKSMSEKIIFWATVYGDSKKFLKERLEDAYGNELDQKQIKRILGLRFKDWGRLSEAFLNLEGKNSKTNQSQTIIEALWNGDGTNNFNLMELLSSQFTYRDTLKKRALKGEKTLTNITYEDLSDLYLSPSVRRMVWQTILIVKELRQVLGAGPAKIFIEMARDVTLKAGTRTTSRRQQLLDLYKNVQTESRNWVEEIETQEESRFRSKKIFLYYTQMGQCMYTGEPIVFKDLFNRNLYDIDHIYPRHFVKDDSLINNLVLVKKQANSHKSDTFPIENSIQQARRDFWKWLSEKGLISREKFNRLTRRTSFSDEELAGFISRQIVETRQGTKAVAQIFENALPDSEVVYVKAGNVSDFRHHFNLLKCREINDLHHAQDAYLNVVVGNVYHTKFTKNPINFIKGYRKDRKAYAYHMDQIFDHPVKRNDIIAWQTDKNQSIATVKKVMAKGTPLVTRMSYEEHGELSNQNICSAKAAQKAEGKGYLPIKNSERLSNTQRYGGYNKYAGSYFFLVEHTLKKNRVRTIETMPLFLRDTIKTSKDLLKYCCESLKLEAPSIRVMKIKMGSLLSVNGAFVYLTGRSGKKLITPNGFQLILPQKWQDYIRLLIKTKDSPDDVEGISGGKNIEFYDILVEKHTKTCLKNRPNPIGEKLREWRNDFIALDNQKQSDILLEILKLTTFDNSGADLRAIGGKNQSGVSTIGKKISSQKSVVLVHRSVTGIFEKQVDLLSI

SEQ ID NO: 610 - protein, 103 aa, Rhizobium etli
MSGEQLTREIGRSGVKASAVGLGTWAIGGWMWGGTDEAQSIAAIQASLDAGVTLIDTAPAYGLGRSEEIVGKALAGRRDKAVIATKCGLVWHTQKGNHFFDQD

SEQ ID NO: 611 - protein, 1059 aa, Rhodovulum sp.
MGIRFAFDLGTNSIGWAVWRTGPGVFGEDTAASLDGSGVLIFKDGRNPKDGQSLATMRRVPRQSRKRRDRFVLRRRDLLAALRKAGLFPVDVEEGRRLAATDPYHLRAKALDESLTPHEMGRVIFHLNQRRGFRSNRKADRQDREKGKIAEGSKRLAETLAATNCRTLGEFLWSRHRGTPRTRSPTRIRMEGEGAKALYAFYPTREMVRAEFERLWTAQSRFAPDLLTPERHEEIAGILFRQRDLAPPKIGCCTFEPSERRLPRALPSVEARGIYERLAHLRITTGPVSDRGLTRPERDVLASALLAGKSLTFKAVRKTLKILPHALVNFEEAGEKGLDGALTAKLLSKPDHYGAAWHGLSFAEKDTFVGKLLDEADEERLIRRLVTENRLSEDAARRCASIPLADGYGRLGRTANTEILAALVEETDETGTVVTYAEAVRRAGERTGRNWHHSDERDGVILDRLPYYGEILQRHVVPGSGEPEEKNEAARWGRLANPTVHIGLNQLRKVVNRLIAAHGRPDQIVVELARELKLNREQKERLDRENRKNREENERRTAILAEHGQRDTAENKIRLRLFEEQARANAGIALCPYTGRAIGIAELFTSEVEIDHILPVSLTLDDSLANRVLCRREANREKRRQTPFQAFGATPAWNDIVARAAKLPPNKRWRFDPAALERFEREGGFLGRQLNETKYLSRLAKIYLGKICDPDRVYVTPGTLTGLLRARWGLNSILSDSNFKNRSDHRHHAVDAVVIGVLTRGMIQRIAHDAARAEDQDLDRVFRDVPVPFEDFRDHVRERVSTITVAVKPEHGKGGALHEDTSYGLVPDTDPNAALGNLVVRKPIRSLTAGEVDRVRDRALRARLGALAAPFRDESGRVRDAKGLAQALEAFGAENGIRRVRILKPDASVVTIADRRTGVPYRAVAPGENHHVDIVQMRDGSWRGFAASVFEVNRPGWRPEWEVKKLGGKLVMRLHKGDMVELSDKDGQRRVKVVQQIEISANRVRLSPHNDGGKLQDRHADADDPFRWDLATIPLLKDRGCVAVRVDPIGVVTLRRSNV

SEQ ID NO: 612 - protein, 1405 aa, Riemerella anatipestifer
MKTILGLDLGTNSIGWALVKEAENSNEKSEIIKLGVRVNPLTVDEKTNFEAGRPLSTNADRTAKRSARRNLQRYKLRRKNLIDLLIKNQLIDKDTPLTEIGKNTTHQTLELRAKAARERIELEDLARVFLAINKKRGYRSSRKVNNEEEGQAVDGMAVAKKLYDENLTPGQYAYELLSKGKKYVPDFYRSDLQAEFNAIWEYQKQFYADILDDELYNALKGQGQQNSRKRFLAIKGVYTAENKGKRDDVKLRHYKWRSEAISKKINIEEVAYVLVEINNDLNKSSGYLGAISDRSKELYFNKETVGENLWKQIQKNPHTSLKNQVFYRQDYLDEFEQIWETQAQFHPQLTLALKEQIRDVIIFYQRKLKSQKGLLSFCQFESWEIERKDENGNVILNKTTQLPKRQTVGRRVAPKSSPLFQEFKIWQNINNLEVTKISEGASKNKKETETLSDDERKLLFEELNLRGNLSQKEVLQILGLKDKEYKTNFSEGLEGNRTNAALFNIYQQIAENEGYGFDWSKKSAQEIKEELKAVFPQIGIQADILDFNANLDGKEFENQASYQLWHLLYSAEEDDKINEEDQIIYGNSAVSLKKKLCEKFGFTPEYAKWIANVSLQDDYGNLSTKAMRKIIPYLIDGNDYSEACALAGYNHSNSLTKEENDNRELLDKLELLPKNSLRNPVVEKILNQMVNVVNQVIETYGKPDEVRIELARELKKSAEKRAEMTKSINEATRRNEDIKKLITKDFGIPNPTKSDVVRYRLWEELAPLAYKDVFTGKQIKKEDLFSSKIDIEHIIPKALLFDDSFSNKTLVFRETNLKKADRTAYDFIESDYNATLDDYIQRVETLYNNTKGTISKGKRNKLLMAQKNLPDGFIERDLRNSQYIAKKAKAMLYQVFKDVNVTSGSITDRLREDWDLINVMKELNFPKYKALGLTEIEERYDIGQEKTKRVEVITDWTKRNDHRHHAMNALTVAFTTSSHIQYLNYLNARKNESHKEHKNIKGIENKITHKQKDKRKFIPPMPNFREEAKKHIETILVSIKNKNKVYTKNINKTKKKSGHNTKEQLTPRGQLHKETVYGKSKRPMSKPTKINKNFSLEQAQLIINVQEKELVLRHLAQFDNNPAVAFDTKTLKKMPLLKNGEPLKEVLCFEEIFTIRKDITPDLKIEKVVDEKIKAILEQRKKDFGGNAKEAFSDLDKNPIWLNKKKGICIKRVTITGVSNAEALHHQKDHLGREILDDNGNPIPADFVSTGNNHHLAVYLDSEGKLQDNIVSFYEAVVRTSQGLPVVDKGLNKDLGWKFLFSLKQNEMFVFPNDDFDINDFDLLDDKKAELISKHLYRVQKISKVSAGNSFVRDIVFRHHLETTVKEVKELKDISYIQLKSLEGLRNIKKVRINHIGKIVQVGEY

SEQ ID NO: 613 - protein, 1145 aa, Riemerella anatipestifer
MKTILGLDLGTNSIGWALVKETENSNEKSEIIKLGVRVNPLTVDEKTNFEAGRPLSTNADRTAKRSARRNLQRYKLRRKNLIDLLIKHRLIDKDTPLTEIGKNTTHQTLELRAKAARERIELEDLARVFLAINKKRGYRSSRKVNNEEEGQVVDGMAVAKKLYDENLTPGQYAYELLSKGKKYVPDFYRSDLQAEFDSIWEYQKQFYADILDDELYNALKGQGQQNSRKRFLAIKGVYTAENKGKRDEVKLQHYKWRSEAITQKLSIEEVAYVLVEINNDLNKSSGYLGAISDRSKELYFNKETVGENLWKQIQKNPHTSLKNQVFYRQDYLDEFEQIWETQAQFHPQLTLALKEQIRDVVIFYQRKLKSQKGLLSFCQFESWEIERKDENGNVILNKTTQLPKRQTVGRRVAPKSSPLFQEFKIWQNINNLEIAKISDGNSKNKKETEALSDDERKLLFEELNLRGNLSQKEVLQILGLKDKEYKTNFPEGLEGNRTNAALFNIYQQIAENEGYGDWTKKSAQEIKEELKAVFPQIGIQADILDFNAELDGKEFENQASYQLWHLLYSAEEDDKINEEDQIIYGNSAVSLKKKLCEKFGFTPEYAKWIANVSLQDDYGNLSTKAMRKIIPYLIDGNDYSEACALAGYNHSNSLTKEENDNRERLNKLELLPKNSLRNPVVEKILNQMVNVVNQVIETYGKPDEVRIELARELKKSAEERAEMTKGINEATRRNEDIKKLITKNFGIPNPTKNDVVRYRLWEELAPLAYKDVFTGRQIKKEDLFSSKIDIEHIIPKALLFDDSFSNKTLAFRETNLKKADRTAYGFIESDYNATLDDYIQRVETLYNNAKGTISKGKRNKLLMAQKNLPDGFIERDLRNSQYIAKKAKSMIEKVFNDVNVTSGSITDRLREDWDLINVMKELNFPKYKALGLTEIEERYDIGQEKTKKVEVITDWTKRNDHRHHAMDALTVAFTTKSHVQYLNNLNTIHSLKGDEVDLELSKLYGLKNTITEVVNKKRKFIPPMPNFREEAKKHIETILVSIKNKNKVYTKNINKTKKESGYHTKEQLTPRGQLHKETVYGKSKRPMNKPTKINKNFSLEQAQLIINVQEKELVLRHLAQFDNNPAVAFDTKTLKKCHYLKMVNL

SEQ ID NO: 614 - protein, 1400 aa, Riemerella anatipestifer
MKTILGLDLGTNSIGWALVKETENSNEKSEIIKLGVRVNPLTVDEKTNFEAGRPLSTNADRTAKRSARRNLQRYKLRRKNLIDLLIKHRLIDKDTPLTEIGKNTTHQTLELRAKAARERIELEDLARVFLAINKKRGYRSSRKVNNEEEGQVVDGMAVAKKLYDENLTPGQYAYELLSKGKKYVPDFYRSDLQAEFDSIWEYQKQFYADILDDELYNALKGQGQQNSRKRFLAIKGVYTAENKGKRDEVKLQHYKWRSEAITQKLSIEEVAYVLVEINNDLNKSSGYLGAISDRSKELYFNKETVGENLWKQIQKNPHTSLKNQVFYRQDYLDEFEQIWETQAQFHPQLTLALKEQIRDVVIFYQRKLKSQKGLLSFCQFESWEIERKDENGNVILNKTTQLPKRQTVGRRVAPKSSPLFQEFKIWQNINNLEIAKISDGNSKNKKETEALSDDERKLLFEELNLRGNLSQKEVLQILGLKDKEYKTNFPEGLEGNRTNAALFNIYQQIAENEGYGDWTKKSAQEIKEELKAVFPQIGIQADILDFNAELDGKEFENQASYQLWHLLYSAEEDDKINEEDQIIYGNSAVSLKKKLCEKFGFTPEYAKWIANVSLQDDYGNLSTKAMRKIIPYLIDGNDYSEACALAGYNHSNSLTKEENDNRERLNKLELLPKNSLRNPVVEKILNQMVNVVNQVIETYGKPDEVRIELARELKKSAEERAEMTKGINEATRRNEDIKKLITKNFGIPNPTKNDVVRYRLWEELAPLAYKDVFTGRQIKKEDLFSSKIDIEHIIPKALLFDDSFSNKTLAFRETNLKKADRTAYGFIESDYNATLDDYIQRVETLYNNAKGTISKGKRNKLLMAQKNLPDGFIERDLRNSQYIAKKAKSMIEKVFNDVNVTSGSITDRLREDWDLINVMKELNFPKYKALGLTEIEERYDIGQEKTKKVEVITDWTKRNDHRHHAMDALTVAFTTKSHVQYLNNLNTIHSLKGDEVDLELSKLYGLKNTITEVVNKKRKFIPPMPNFREEAKKHIETILVSIKNKNKVYTKNINKTKKESGYHTKEQLTPRGQLHKETVYGKSKRPMNKPTKINKNFSLEQAQLIINVQEKELVLRHLAQFDNNPAVAFDTKTLKKMPLLKNGEPLKEVLCFEEIFTIRKDITPDLKIEKVVDEKIKAILEQRKKDFGGNAKEAFSDLDKNPIWLNKEKGICIKRVTITGVSNAEALHHQKDHLGREILDDNGNPIPADFVSTGNNHHVAIYEDEKGKLQEKVVSLYEAVARANQGLPVVDKGLNEDLGWKFLFTMKQNEMFVFPNDDFDVNDIDLLDENNAKIISQHLFRVQKLATKNYMFRHHLETNVQEVKELNDIAYKSIRSTEPLKNIKKVRINHIGKIVQVGEY

SEQ ID NO: 615 - protein, 1128 aa, Roseburia intestinalis
MDEKMDYRIGLDIGIASVGWAVLQNNSDDEPVRIVDLGVRIFDTAEIPKTGESLAGPRRAARTTRRRLRRRKHRLDRIKWLFENQGLINIDDFLKRYNMAGLPDVYQLRYEALDRKLTDEELAQVLLHIAKHRGFRSTRKAETAAKENGAVLKATDENQKRMQEKGYRTVGEMIYLDEAFRIGCSWSEKGYILTPRNKAENYQHTMLRAMLVEEVKEIFSSQRRLGNKKATEELEEKYLEIMTSQRSFDLGPGMQPDGKPSPYAMEGFSDRVGKCTFLGDQGELRGAKGTYTAEYFVALQKINHTKLVNQDGETRNFTEEERRALTLLLFTQKEVKYAAVRKKLGLPEDILFYNLNYKKAATKEEQQKENQNTEKAKFIGMPYYHDYKKCLEERVKYLTENEVRDLFDEIGMILTCYKNDDSRTERLAKLGLVPIEMEGLLAYTPTKFQHLSMKAMRNIIPFLEKGMTYDKACEEAGYDFKADSKGTKQKLLTGENVNQTINEITNPVVKRSVSQTVKVINAIIRTYGSPQAINIELAREMSKTFEERRKIKGDMEKRQKNNEDVKKQIQELGKLSPTGQDILKYRLWQEQQGICMYSGKTIPLEELFKPGYDIDHILPYSITFDDSFRNKVLVTSQENRQKGNRTPYEYMGNDEQRWNEFETRVKTTIRDYKKQQKLLKKHFSEEERSEFKERNLTDTKYITTVIYNMIRQNLEMAPLNRPEKKKQVRAVNGAITAYLRKRWGLPQKNRETDTHHAMDAVVIACCTDGMIQKISRYTKVRERCYSKGTEFVDAETGEIFRPEDYSRAEWDEIFGVHIPKPWETFRAELDVRMGDDPKGFLDTHSDVALELDYPEYIYENLRPIFVSRMPNHKVTGAAHADTIRSPRHFKDEGIVLTKTALTDLKLDKDGEIDGYYNPQSDLLLYEALKKQLLLYGNDAKKAFAQDFHKPKADGTEGPVVRKVKIQKKQTMGVFVDSGNGIAENGGMVRIDVFRVNGKYYFVPVYTADVVKKVLPNRASTANKPYSEWRTMEDKDFLFSLYSRDLVHIKSKKGIPIKNVDGSLGESKEVYAYYIGADISGAKIEGKAHDSRYTFRGIGVQKLELIEKCQVDILGHISTVKNEKRMGFS

SEQ ID NO: 616 - protein, 1471 aa, Scardovia wiggsiae
MGYKAPRNDKGEIDYGVGLDLGNGSVGWVAMDKDYHLIRARGHELIGARLFDPANSAENRRESRTTRRRLSRRRWRLRMLDSLFASELAKIDPNFLARRKYSWVHPKDEQNHENWYGSIIFGSKEQDKQFYKDYPTIYHLRKKLTEDTERHDIREIYVAIHHIVKYRGHFLREGEINSENLFDPEGFVELIKDVIKLNNSYDESTPIFEASPADVSEALLNEHTSRSGRIEDTLDKLDFSVSRVDKHELKGMRDAAKAVIGAIVGNTADFSKIFNLDNLDKDSKDNLKLKFADSNFDEKYGGVVGSGLLDETQIELVDRIHAVYDAVALKGILGDAHTISEAKVESYEKHRKNWKLIKEELRTKENKDEVDLWYGDLSGRQYKNPPDPEKGPDEGSKKDSPIRDSDQKQNLIKKANDYFTELIDDSQLSEEQKNCLKNDINNGQLFPVQRSSDNGVIPYQIHLNELRRIIENQKQYYPFLAETFIRKTAEGKSYEENKIVALLKFRVPYYVGPLVSKEDMEEHSSGNSAYHWMARNPGRGEAITPWNFDEVVDKDESGARFISRLTGTDTYLLGEPTLPQHSLLYEEYMVLSELNNVRLNVRQGNHWSDKNRQRLSYKQKEFLIENLFKEHKTVTRKRAEDCLSSMGCGEVQLFGLSDEKKFASSLSSYITLKKILGKAFVDDSGNSAILERIIEVQTVFEDREPLTHQLSLIDSLTVEQRKQLAKIHYTGWGKLSRKLLTSKKGSYKIHSQNEIMRTQHSIIDIMRGDSLNLIEIIRDKKIGIGEWIDNENLDRETGESDVSRLESVFEGIVMSPRVKRGVVQAVRVIDDLAKAIGNPPQRIFIEMADEVQASQRTVSRLSRLKALYGSPSLQKEFNDLKDLRKSLNETKDADLQEDRLYLYYIQLGKDLYTGKEISIDSLSSAYDIDHIVPQALTQDDSIDNRVLVSRKENARKTDSYLYTPDLIKNMRPLWGKLLAAGLMSQKKYDALTRVDDFKDREKQRFVQRSLVETRQIMKNVSTILRTYYGEDTNVVTLKSSITHDMRKYLGFPYKNRDINDYHHAQDALCISAAGQFMLNRHFVSGGEVTDGASNAYNMYLAEYLQEFRDAKARGERKRSTAFGFVVGSMSSKDDEKRTDHRTGEIVWSETNAEYLRKVMNYKKMLITQKVGDVKTRALYDETRYGHKESSAKSIKFDNLRRDTSLYGGFSGASTAYMMLVEYKKKNKLVSITAQEASLLAVADQKNDTVSVMDGILASHGLSGAKILLPKIVTGQLLDYSDALVTLQSASELNTARQMWLPRNDYNDIDIILKSKDIEDAAHKLGYDSDTVHVLRRIQKLFEAVFRVAESQFPLHQLSKDQQEEILRDPQNYGFGSAVKLLGGLLKALHANAENTNLAGLVKVLHGDKEYSDDGKAKEFKKFGFSPRWRRISNPTGFTLSDSDTFIYQSPSGIFEQRVTVKELKEKADKQK

SEQ ID NO: 617 - protein, 116 aa, Sphingobacterium spiritivorum
MFRKYFEEKNSARLLFTLKQGDFVYVPDDNEEVILDESSPLFIDYWKNISERSNNIHVVQKFSGKEIYFLKHTIADTIAKKIEFGSQDCYQSLNGKSIKEFCIKIDSDRLGNISKV

SEQ ID NO: 618 - protein, 1306 aa, Sphingobacterium spiritivorum; identical to SEQ ID NO: 93

SEQ ID NO: 619 - protein, 1110 aa, Sphingobium sp.
MAEGKKRIWRLGADLGANSLGWAAIELSAPVNGKPIAILAAGSRIFSDGRDPKSGASLAVDRRDARAMRRRRDRFKQRQKALIKYLIADGLFPADEAARNAMAAIDPYAVRARALDEALSLPELGRALFHLNQRRGFKSNRKADRKADDDAGKIAIGIDRTRDAIAEDEADAGAEPGSWTFGKWLHERRLKGQSVRTRLRPESGEDAKGDGYDFYPDRALMEEEFDAIWAAQAPHHPDVLTNDVHDRLHEIIFYQRPLKAPQVGMCSLIPGDRRLPKAHPLFQRRRLLEELNALMIVRPGEVAQRLTREERDILLLKLKDKNKVSFATLRKALKLDPDARFNKESEDRTDLKGDEVAAVMGSKTRFGNLWVHLSIEAQWDVLARLDAVESDAEDAAFCAWLVETYALTPEQARAVANAPLPPGYGRFGETATRKLIEALRDGKKDDRVLVYSEAVTEAGLGHHSDRRTGEVFEDAKGRPQLPYYGVALERHIMPGTGDPSDPEEMRVGRLTNPTVHIGLNQLRRILNVLIRAYGPPAEIAIELARELKLTDEDKKRINRENNDNRIAAERRSEKLLAIGQADSGANRALLKLWEELNPANVLDRRCIYSGRQISIDMLFSAAVEVDHILPFAATLDDSNGNKIVCLREANREKRKRSPHDAWGHSARWDEIAARAAQLPRNKRWRFEPDAMDKFRDEGGFQARHLVDTQYLARLSREYLATLYPEKGEGSGHIWVSPGRLTEMVRRKLGLNDLLPDHNFGGGADQAKNRLDHRHHAIDAVVVAIVDRGMLNAIARASGQEGAEGRERIIIPEPWDGFRDALRETVNRITVSHRTDHGTASKAGLPKGKDATAGRLHNDTAYGFTGDTDAKGNSIVVRRVPLSSFKKLADLDRIRDADLKAALYQHLNGLEGKAFEKALAEFHKLEWHNFGGVRRVRVTEPLTVIPIKDRNGRIYKGYKGDSNYRYDVWELPDGKWVTNWKNEAGEAMSSVISMFDAHQSSEPPRPHPAARKILSLHQNDLLAIEREGEDRKLMRVVKFGQSGQITLAEHQQAGDLKKRDAVSNDDDPFKYFAPTSGGLKKVKARQVRIDEIGRVLDPGFPARTARRKTRG

SEQ ID NO: 620 - protein, 1084 aa, Sporolactobacillus vineae
MKYSIGLDIGISSVGWSVINLDRERIELMGARLFDAAENPKNGSSLAAPRRDARSARRRLRRRRYRVGRVRHFIIDRGLVTRGQADQLFDWKDGDLDIWLVRVNALERLLTDREFARVLIHIAKNRGYRSNRKSEAKSGENGQVLSAIKANKELMEEKGYQTVAEMLVNEPETFAGRKRNRGGEYTHVIARSELEHEIRLIFTKQRAFGNRFATEENENTYVKIWAAQRPVATKDDILKKIGDCTFEKGEKRAPKASYAFQYFRALDKLNRLRILSVREPSRNLTDDERNLIVPALFNHDKQKYSDLRKILQLRDDQKFNELFYDPGKSLKENENKTFLSLAEQYKIRKVIRDVQGKDGLLQYRPLDIDTIAYALTVFKDDQDTRDYLSNTFVNGNGKQVLNLANRAFDAELIDGLLSLSFAKFGHLSLKALHKLIPHMEQGLSYYDACKKVGYHDNEQVGKSKQHLLPVIPADEIRNPVVVRSLSQTRKVINAIIKRYGSPTFMYIELAREMGRPYNERRDLEKQYNKNRTVNDSAIEQIHELYPEIGAPRGHDILKYKLWQQQDCKCAYSLEKIPAEKIFEPGYAEVDHIIPYSRSFDDSNSNKVLVLSRMNQEKKNRTPYEWFGGDEHRWNKFESYVNALKVNRKKKSLLTKKNMDTEEEDTFKSRHLNDTRYITRFIKSFVEDNLLFREIEGAKQHVFTVNGAYTSLMRKRWGFNKNREESDLHHSVDAVIIAVSQPFRNEVSRYFKHREISLPQLLKRTWDYFPEPWEGFVKELRARTLQDPEKLKLALESLDLDSYDPEFIDEVKPIFISRMPKRSIKGQIHDETLRRNRGKTKDGFVKIVTRTRLENIKFDKNGDFPMYGRESDPKTYQAIKQRYLENNKDKKKAFIEPLYKPAKNPNNASLIRSVKIEDKANQIVPLRDEAVAYNASIVRTEVYRNKETGKFYLAPVYVSDVFAGREPRRFIRANVPYEQWVNITDKFTFLFNLYPNDVIYIKMKKVKTTKSNINKTISWQESYFYFKGTDIHTGAITIIDHMNSFTDRVGTQGLQLFEKYQVDPLGNLSRVHGETQYGVPALSHS

SEQ ID NO: 621 - protein, 475 aa, Staphylococcus massiliensis
MGQDYILGLDIGITSVGYGLIDYHDKSVIDAGVRLFKEANVENNEGRRSKRGSRRLQRRRKHRLARTRNLLESYQLNPFPKCEKNPYEIRVKGFKEVLTSDELSAALLHLAKRRGIDNVHVTDTESDSSDNGLSTKEQLAKNQKALESRYVCELQLERLLNDNKVRGANNRFKTQDFVREAKQILSIQKDHHNLDQVFIDKYISLLETRREYYEGPGKGSPYGWDGDIKKWYELLMGRCTYFPESLRSVKYAYSADLFNALNDLNNLVIVRDENDKLTYPEKYHIVENVFKQRKKPTLKQIAKEIDVAPEDIRGYRVTASGTPVFTSFKLYHDIKSVTSNDKVLEDTELLDAIAEVLTIYQSPIEVQEKLESLNVILTKEEIEGISKLTGYTGTHALSLKAIQIVIDELWETNDNQMTIFTRLNMKPQKVDLAKANKIPTSLVEDFIISPVAKRAFIQSIKVINAVIKNMVCLKI

SEQ ID NO: 622 - protein, 581 aa, Staphylococcus massiliensis
MPKDIIIELAREKNSDEERKIIRDVQKRNQQTRDLVDKVIKETGKTKAKGMVEKLILHDKQEGKCLYSLKSIPLEDLLNNPHHYEVDHIIPRSVSYDNSMNNKVLVLQEENSKKSNQTPFQYFNSSNTHITFKQFKQHVLNLSKTKDRITKKKKEYLLEERDINKFSVQKEFINRNLVDTRYATRELMTLLRAYFSANELDVKVKAINGGFTSYLRKRWDFKKDRNAGYKHHAEDALIIANVDFIFKQLKALDNAKKVMEGRKVQVEKDNVEDNEHYESLFREPDQIKEIKLYDNYKFSHRVDKKPNRELINDTIYSTRKVDNKTYTIQTVNNIYDKQNDQLKKLFNKSPEKFLMYKHDPKTFDKLATIMRQYKNEKNPLYKFHDETGEYLTKYAKKDNGPIVKSLKYIGKQVNAHLDITNDYENSNNKVVKLSLKPFRFDVYLDDGKYKFVTVKYLDIIKKDTYYVIDEEKYKLALQQKKISENAKFIGSFYNNDLIKINGELLRVIGVNDDAKNTLELNMIDISYRDYVENMNLATTPRIRKNIGKSITILEKYTTDILGNTFKISSPEKPQFIFKVRD

SEQ ID NO: 623 - protein, 1334 aa, Staphylococcus pseudintermedius; identical to SEQ ID NO: 200

SEQ ID NO: 624 - protein, 1112 aa, Staphylococcus simulans; identical to SEQ ID NO: 247

SEQ ID NO: 625 - protein, 773 aa, Streptococcus agalactiae
MNKPYSIGLDIGTNSVGWSIITDDYKVPAKKMRVLGNTDKEYIKKNLIGALLFDGGNTAADRRLKRTARRRYTRRRNRILYLQEIFAEEMSKVDDSFFHRLEDSFLVEEDKRGSKYPIFATLQEEKDYHEKFSTIYHLRKELADKKEKADLRLIYIALAHIIKFRGHFLIEDDSFDVRNTDISKQYQDFLEIFNTTFENNDLLSQNVDVEAILTDKISKSAKKDRILAQYPNQKSTGIFAEFLKLIVGNQADFKKYFNLEDKTPLQFAKDSYDEDLENLLGQIGDEFADLFSAAKKLYDSVLLSGILTVIDLSTKAPLSASMIQRYDEHREDLKQLKQFVKASLPEKYQEIFADSSKDGYAGYIEGKTNQEAFYKYLSKLLTKQEDSENFLEKIKNEDFLRKQRTFDNGSIPHQVHLTELKAIIRRQSEYYPFLKENQDRIEKILTFRIPYYIGPLAREKSDFAWMTRKTDDSIRPWNFEDLVDKEKSAEAFIHRMTNNDFYLPEEKVLPKHSLIYEKFTVYNELTKVRYKNEQGETYFFDSNIKQEIFDGVFKEHRKVSKKKLLDFLAKEYEEFRIVDVIGLDKENKAFNASLGTYHDLEKILDKDFLDNPDNESILEDIVQTLTLFEDREMIKKRLENYKDLFTESQLKKLYRRHYTGWGRLSAKLINGIRDKESQKTILDYLIDDGRSNRNFMQLINDDGLSFKSIISKAQAGSHSDNLKEVVGELAGSPAIKKGILQSLKIVDELVKVMGYEPEQIVVEMARENQTTNQ

SEQ ID NO: 626 - protein, 1370 aa, Streptococcus agalactiae
MNKPYSIGLDIGTNSVGWSIITDDYKVPAKKMRVLGNTDKEYIKKNLIGALLFDGGNTAADRRLKRTARRRYTRRRNRILYLQEIFAEEMSKVDDSFFHRLEDSFLVEEDKRGSKYPIFATMQEEKDYHEKFPTIYHLRKELADKKEKADLRLVYLALAHIIKFRGHFLIEDDRFDVRNTDIQKQYQAFLEIFDTSFENNHLLSQNVDVEAILTDKISKSAKKDRILAQYPNQKSTGIFAEFLKLIVGNQADFKKHFNLEDKTPLQFAKDSYDEDLENLLGQIGDEFADLFSAAKKLYDSVLLSGILTVTDLSTKAPLSASMIQRYDEHREDLKQLKQFVKASLPEKYQEIFADSSKDGYAGYIEGKTNQEAFYKYLSKLLTKQEDSEYFLEKIKNEDFLRKQRTFDNGSIPHQVHLTELKAIIRRQSEYYPFLKENQDKIEKILTFRIPYYVGPLARGNSDFAWMTRKTDDSIRPWNFEDLVDKEKSAEAFIHRMTNNDLYLPEEKVLPKHSLIYEKFTVYNELTKVRYKNEQGETYFFDSNVKQEIFDGVFKEHRKVSKKQLLDFLAKEFEEFRIVDVTGLDKENKAFNASLGTYHDLKKILDKDFLDNPDNESILEDIVQTITLFEDREMIKKRLENYKDLFTESQLKKLYRRHYTGWGRLSAKLINGIRDRESQKTILDYLISDGRANRNFMQLINDDGLSFKSIISKAQSGSHSDNLKEVVGELAGSPAIKKGILQSLKIVDELVKVMGYEPEQIVVEMARENQTTNQGRRNSRQRYKLLEDGVKNLASDLNGDILKEYPTDNQALQNERLFLYYLQNGRDMYTGEALDIDNLSQYDIDHIVPQAFIKDDSIDNRVLVSSAKNRGKSDDVPSIDIVKARKAFWKKLLDAKLISQRKYDNLTKAERGGLTPDDKAGFIQRQLVETRQITKHVARILDERFNNKVDDNNKPIRKVKIVTLKSNLVSNFRKEFGFYKIREVNNYHHAHDAYLNAVVAKAILTKYPQLEPEFVYGDYPKYNSYKTRKSATEKLFFYSNIMNFFKTKVTLADETVVVKDDIEVNNETGEIAWDKKKHFATVRKVLSYPQVNIVKKTEVQTGGFSKESILAHSNSDKLIPRKTKDIYLDPKKYGGFDSPIVAYSVLVLADIKKGKAQKLKTVKELIGITIMERERFEKNPSAFLESKGYLNIRTDKLIILPKYSLFELENGRRRLLASAGELQKGNELALPTQYMKFLYLASRYNESKGKPEEIEKKQEFVNQHVSYFDDILQLINDFSKRVILADANLEKINKLYSDNKDNTPVDELAKNIINLFTFTSLGAPAAFKFFDKSVDRKRYTSTKEVLDSTLIHQSITGLYETRIDLGKLGED

SEQ ID NO: 627 - protein, 1370 aa, Streptococcus agalactiae
MNKPYSIGLDIGTNSVGWSIITDDYKVPAKKMRVLGNTDKEYIKKNLIGALLFDGGNTAADRRLKRTARRRYTRRRNRILYLQEIFAEEMSKVDDSFFHRLEDSFLVEEDKRGSKYPIFATMQEEKDYHEKFPTIYHLRKELADKKEKADLRLVYLALAHIIKFRGHFLIEDDRFDVRNTDIQKQYQAFLEIFDTSFENNHLLSQNVDVEAILTDKISKSAKKDRILAQYPNQKSTGIFAEFLKLIVGNQADFKKHFNLEDKTPLQFAKDSYDEDLENLLGQIGDEFADLFSAAKKLYDSVLLSGILTVTDLSTKAPLSAYMIQRYDEHREDLKQLKQFVKASLPEKYQEIFADSSKDGYAGYIEGKTNQEAFYKYLSKLLTKQEDSEYFLEKIKNEDFLRKQRTFDNGSIPHQVHLTELKAIIRRQSEYYPFLKENQDKIEKILTFRIPYYVGPLARGNSDFAWMTRKTDDSIRPWNFEDLVDKEKSAEAFIHRMTNNDLYLPEEKVLPKHSLIYEKFTVYNELTKVRYKNEQGETYFFDSNVKQEIFDGVFKEHRKVSKKQLLDFLAKEFEEFRIVDVTGLDKENKAFNASLGTYHDLKKILDKDFLDNPDNESILEDIVQTITLFEDREMIKKRLENYKDLFTESQLKKLYRRHYTGWGRLSAKLINGIRDRESQKTILDYLISDGRANRNFMQLINDDGLSFKSIISKAQSGSHSDNLKEVVGELAGSPAIKKGILQSLKIVDELVKVMGYEPEQIVVEMARENQTTNQGRRNSRQRYKLLEDGVKNLASDLNGDILKEYPTDNQALQNERLFLYYLQNGRDMYTGEALDIDNLSQYDIDHIVPQAFIKDDSIDNRVLVSSAKNRGKSDDVPSIDIVKARKAFWKKLLDAKLISQRKYDNLTKAERGGLTPDDKAGFIQRQLVETRQITKHVARILDERFNNKVDDNNKPIRKVKIVTLKSNLVSNFRKEFGFYKIREVNNYHHAHDAYLNAVVAKAILTKYPQLEPEFVYGDYPKYNSYKTRKSATEKLFFYSNIMNFFKTKVTLADETVVVKDDIEVNNETGEIAWDKKKHFATVRKVLSYPQVNIVKKTEVQTGGFSKESILAHSNSDKLIPRKTKDIYLDPKKYGGFDSPIVAYSVLVLADIKKGKAQKLKTVKELIGITIMERERFEKNPSAFLESKGYLNIRTDKLIILPKYSLFELENGRRRLLASAGELQKGNELALPTQYMKFLYLASRYNESKGKPEEIEKKQEFVNQHISYFDDILQLINDFSKRVILADANLEKINKLYSDNKDNTPVDELAKNIINLFTFTSLGAPAAFKFFDKSVDRKRYTSTKEVLDSTLIHQSITGLYETRIDLGKLGED

SEQ ID NO: 628 - protein, 1378 aa, Streptococcus agalactiae
MNKPYSIGLDIGTNSVGWSIITDDYKVPAKKMRVLGNTDKEYIKKNLIGALLFDGGNTAADRRLKRTARRRYTRRRNRILYLQEIFAEEMSKVDDSFFHRLEDSFLVEEDKRGSKYPIFATMQEEKYYHEKFPTIYHLRKELADKKEKADLRLIYLALAHIIKFRGHFLIEDDRFDVRNTDIQKQYQAFLEIFDTTFENNDLLSQNVDVEAILTDKISKSAKKDRILARYPNQKSTGIFAEFLKLIVGNQADFKKHFNLEDKTPLQFAKDSYDEDLENLLGQIGDEFADLFSAAKKLYDSVLLSGILTVIDLSTKAPLSASMIQRYDEHHEDLKHLKQFVKASLPENYREVFADSSKDGYAGYIEGKTSQEAFYKYLLKLLTKQEGSEYLLEKIKNEDFLRKQRTFDNGSIPHQVHLTELRAIIRRQSEYYPFLKENLDRIEKILTFRIPYYVGPLAREKSDFAWMTRKTDDSIRPWNFEDLVDKEKSAEAFIHRMTNNDLYLPEEKVLPKHSLIYEKFTVYNELTKVRFLAEGFKDFQFLNRKQKETIFNSLFKEKRKVTEKDIISFLNKVDGYEGIAIKGIEKQFNASLSTYHDLKKILGKDFLDNTDNELILEDIIQTLTLFEDREMIKKRLDIYKDFFTESQLKKLYRRHYTGWGRLSAKLINGIRNKENQKTILDYLIDDGSANRNFMQLIKDAGLSFKPIIDKARTGSHSDNLKEVVGELAGSPAIKKGILQSLKIVDELVKVMGYEPEQIVVEMARENQTTAKGLSRSRQRLTTLRESLGNLKSNILEEKKPKYVKDQVENHHLSDDRLFLYYLQNGKDMYTDDELDIDNLSQYDIDHIIPQAFIKDDSIDNRVLVSSAKNRGKSDDVPSIEIVKARKMFWKNLLDAKLMSQRKYDNLTKAERGGLTSDDKARFIQRQLVETRQITKHVARILDERFNNELDSKGRRIRKVKIVTLKSNLVSNFRKEFGFYKIREVNNYHHAHDAYLNAVVAKAILTKYPQLEPEFVYGLYRRKKLSKIVREDKEEKYSEATRKMFFYSNLMNMFKRVVRLADGSIVVRPVIETGRYMGKTAWDKKKHFATVRKVLSYPQNNIVKKTEIQTGGFSKESILAHGNSDKLIPRKTKDIYLDPKKYGGFDSPIVAYSVLVVADIKKGKAQKLKTVTELLGITIMERSRFEKNTSAFLESKGYLNIRDDKLMILPKYSLFELENGRRRLLASAGELQKGNELALPTQFMKFLYLASRYNESKGKPEEIEKKQEFVNQHVSYFDDILQLINDFSNRVILADANLEKINKLYQDNKENIPVDELANNIINLFTFTSLGAPAAFKFFDKIVDRKRYTSTKEVLNSTLIHQSITGLYETRIDLGKLGEG

SEQ ID NO: 629 - protein, 1370 aa, Streptococcus agalactiae
MNKPYSIGLDIGTNSVGWSIITDDYKVPAKKMRVLGNTDKEYIKKNLIGALLFDGGNTAADRRLKRTARRRYTRRRNRILYLQEIFAEEMSKVDDSFFHRLEDSFLVEEDKRGSKYPIFATMQEEKYYHEKFPTIYHLRKELADKKEKADLRLIYLALAHIIKFRGHFLIEDDRFDVRNTDIQKQYQAFLEIFDTTFENNDLLSQNVDVEAILTDKISKSAKKDRILARYPNQKSTGIFAEFLKLIVGNQADFKKHFNLEDKTPLQFAKDSYDEDLENLLGQIGDEFADLFSAAKKLYDSVLLSGILTVTDLSTKAPLSASMIQRYDEHREDLKQLKQFVKASLPEKYQEIFADSSKDGYAGYIEGKTNQEAFYKYLSKLLTKQEGSEYLLEKIKNEDFLRKQRTFDNGSIPHQVHLTELRAIIRRQSEYYPFLKENLDRIEKILTFRIPYYVGPLAREKSDFAWMTRKTDDSIRPWNFEDLVDKEKSAEAFIHRMTNNDLYLPEEKVLPKHSLIYEKFTVYNELTKVRFLAEGFKDFQFLNRKQKETIFNSLFKEKRKVTEKDIISFLNKVDGYEGIAIKGIEKQFNASLSTYHDLKKILGKDFLDNTDNELILEDIVQTLTLFEDREMIRKRLDIYKDFFTESQLKKLYRRHYTGWGRLSAKLINGIRNKENQKTILDYLIDDGSANRNFMQLIKDAGLSFKPIIDKARTGSHSDNLKEVVGELAGSPAIKKGILQSLKIVDELVKVMGYEPEQIVVEMARENQTTAKGLSRLRQRLTTLRESLANLKSNILEEKKPKYVKDQVENHHLSDDRLFLYYLQNGKDMYTDDELDIDNLSQYDIDHIIPQAFIKDDSIDNRVLVSSAKNRGKSDDVPSVEIVKDCKVFWKKLLDAKLMSQRKYDNLTKAERGGLTSDDKARFIQRQLVETRQITKHVARILDERFNNELDSKGRRIRKVKIVTLKSNLVSNFRKEFGFYKIREVNNYHHAHDAYLNAVVAKAILTKYPQLEPEFVYGDYPKYNSYKTRKSATEKLFFYSNIMNFFKTKVTLADGTVVVKDDIEVNNDTGEIVWDKKKHFATVRKVLSYPQVNIVKKTEIQTGGFSKESILAHGNSDKLIPRKTKDIYLDPKKYGGFDSPIVAYSVLVVADIKKGKAQKLKTVTELLGITIMERSRFEKNPSAFLESKGYLNIRDDKLMILPKYSLFELENGRRRLLASADELQKGNELALPTQFMKFLYLASRYNELKGKPEEIEQKQEFVVQHVSYFDDILQIINDFSNRVILADANLEKINKLYQDNKENIPVDELANNIINLFTFTSLGAPAAFKFFDKIVDRKRYTSTKEVLNSTLIHQSITGLYETRIDLGKLGED

SEQ ID NO: 630 - protein, 1377 aa, Streptococcus agalactiae
MNKPYSIGLDIGTNSVGWSIITDDYKVPAKKMRVLGNTDKEYIKKNLIGALLFDGGNTAADRRLKRTARRRYTRRRNRILYLQEIFAEEMSKVDDSFFHRLEDSFLVEEDKRGSKYPIFATMQEEKYYHEKFPTIYHLRKELADKKEKADLRLVYLALAHIIKFRGHFLIEDDRFDVRNTDIQKQYQAFLEIFDTTFENNHLLSQNVDVEAILTDKISKSAKKDRILAQYPNQKSTGIFAEFLKLIVGNQADFKKHFNLEDKTPLQFAKDSYDEDLENLLGQIGDEFADLFSVAKKLYDSVLLSGILTVTDLSTKAPLSASMIQRYDEHHEDLKHLKQFVKASLPENYREVFADSSKDGYAGYIEGKTNQEAFYKYLLKLLTKQEGSEYFLEKIKNEDFLRKQRTFDNGSIPHQVHLTELRAIIRRQSEYYPFLKENQDRIEKILTFRIPYYVGPLAREKSDFAWMTRKTDDSIRPWNFEDLVDKEKSAEAFIHRMTNNDLYLPEEKVLPKHSLIYEKFTVYNELTKVRFLAEGFKDFQFLNRKQKETIFNSLFKEKRKVTEKDIISFLNKVDGYEGIAIKGIEKQFNASLSTYHDLKKILGKDFLDNTDNELILEDIVQTLTLFEDREMIKKCLDIYKDFFTESQLKKLYRRHYTGWGRLSAKLINGIRNKENQKTILDYLIDDGSANRNFMQLINDDDLSFKPIIDKARTGSHSDNLKEVVGELAGSPAIKKGILQSLKIVDELVKVMGYEPEQIVVEMARENQTTAKGLSRSRQRLTTLRESLANLKSNILEEKKPKYVKDQVENHHLSDDRLFLYYLQNGRDMYTKKALDIDNLSQYDIDHIIPQAFIKDDSIDNRVLVSSAKNRGKSDDVPSIEIVKARKMFWKNLLDAKLMSQRKYDNLTKAERGGLTSDDKARFIQRQLVETRQITKHVARILDERFNNEVDNGKKICKVKIVTLKSNLVSNFRKEFGFYKIREVNDYHHAHDAYLNAVVAKAILTKYPQLEPEFVYGMYRQKKLSKIVHEDKEEKYSEATRKMFFYSNLMNMFKRVVRLADGSIVVRPVIETGRYMGKTAWDKKKHFATVRKVLSYPQNNIVKKTEIQTGGFSKESILAHGNSDKLIPRKTKDIYLDPKKYGGFDSPIVAYSVLVVADIKKGKAQKLKTVTELLGITIMERSRFEKNPSAFLESKGYLNIRDDKLMILPKYSLFELENGRRRLLASAGELQKGNELALPTQFMKFLYLASRYNESKGKPEEIEKKQEFVNQHVSYFDDILQLINDFSKRVILADANLEKINKLYQDNKENIPVDELANNIINLFTFTSLGAPAAFKFFDKIVDRKRYTSTKEVLNSTLIHQSITGLYETRIDLGKLGED

SEQ ID NO: 631 - protein, 1370 aa, Streptococcus agalactiae
  misc_feature (117)..(117): Xaa can be any naturally occurring amino acid
MNKPYSIGLDIGTNSVGWSIITDDYKVPAKKMRVLGNTDKEYIKKNLIGALLFDGGNTAADRRLKRTARRRYTRRRNRILYLQEIFAEEMSKVDDSFFHRLEDSFLVEEDKRGSKYXIFATLQEEKDYHEKFSTIYHLRKELADKKEKADLRLIYIALAHIIKFRGHFLIEDDSFDVRNTDISKQYQDFLEIFNTTFENNDLLSQNVDVEAILTDKISKSAKKDRILAQYPNQKSTGIFAEFLKLIVGNQADFKKYFNLEDKTPLQFAKDSYDEDLENLLGQIGDEFADLFSAAKKLYDSVLLSGILTVIDLSTKAPLSASMIQRYDEHREDLKQLKQFVKASLPEKYQEIFADSSKDGYAGYIEGKTNQEAFYKYLSKLLTKQEDSENFLEKIKNEDFLRKQRTFDNGSIPHQVHLTELKAIIRRQSEYYPFLKENQDRIEKILTFRIPYYIGPLAREKSDFAWMTRKTDDSIRPWNFEDLVDKEKSAEAFIHRMTNNDFYLPEEKVLPKHSLIYEKFTVYNELTKVRYKNEQGETYFFDSNIKQEIFDGVFKEHRKVSKKKLLDFLAKEYEEFRIVDVIGLDKENKAFNASLGTYHDLEKILDKDFLDNPDNESILEDIVQTLTLFEDREMIKKRLENYKDLFTESQLKKLYRRHYTGWGRLSAKLINGIRDKESQKTILDYLIDDGRSNRNFMQLINDDGLSFKSIISKAQAGSHSDNLKEVVGELAGSPAIKKGILQSLKIVDELVKVMGYEPEQIVVEMARENQTTNQGRRNSRQRYKLLDDGVKNLASDLNGNILKEYPTDNQALQNERLFLYYLQNGRDMYTGEALDIDNLSQYDIDHIIPQAFIKDDSIDNRVLVSSAKNRGKSDDVPSLEIVKDCKVFWKKLLDAKLMSQRKYDNLTKAERGGLTSDDKARFIQRQLVETRQITKHVARILDERFNNELDSKGRRIRKVKIVTLKSNLVSNFRKEFGFYKIREVNNYHHAHDAYLNAVVAKAILTKYPQLEPEFVYGDYPKYNSYKTRKSATEKLFFYSNIMNFFKTKVTLADGTVVVKDDIEVNNDTGEIVWDKKKHFATVRKVLSYPQNNIVKKTEIQTGGFSKESILAHGNSDKLIPRKTKDIYLDPKKYGGFDSPIVAYSVLVVADIKKGKAQKLKTVTELLGITIMERSRFEKNPSAFLESKGYLNIRADKLIILPKYSLFELENGRRRLLASAGELQKGNELALPTQFMKFLYLASRYNESKGKPEEIEKKQEFVNQHVSYFDDILQLINDFSKRVILADANLEKINKLYQDNKENISVDELANNIINLFTFTSLGAPAAFKFFDKIVDRKRYTSTKEVLNSTLIHQSITGLYETRIDLGKLGED

SEQ ID NO: 632 - protein, 1370 aa, Streptococcus agalactiae
MNKPYSIGLDIGTNSVGYSVVTDDYKVPAKKMRVLGNTDKEYIKKNLIGALLFDGGNTASDRRLKRTARRRYTRRRNRILYLQEIFAEEMSKVDDSFFHRLEDSFLVEDDKRGSKYPIFATMQEEKDYHEKFPTIYHLRKELADKKEKADLRLVYLALAHIIKFRGHFLIEDDSFDVRNTDIQRQYQAFLEIFDTTFENNHLLSQNIDVEGILTDKISKSAKKDRILAQYPNQKSTGIFAEFLKLIVGNQADFKKHFNLEDKTPLQFAKDSYDEDLENLLGQIGDEFADLFSVAKKLYDSVLLSGILTVTDLSTKAPLSASMIQRYDEHREDLKQLKQFVKASLPEKYQEIFTDSSKDGYAGYIEGKTNQGAFYKYLSKLLTKQEGSEYFLEKIKNEDFLRKQRTFDNGSIPHQVHLTELKAIIRRQSEYYPFLKENLDRIEKILTFRIPYYVGPLAREKSDFAWMTRKTDDSIRPWNFEELVDKEASAEAFIHRMTNNDLYLPEEKVLPKHSLIYEKFTVYNELTKVRYKNEQGETYFFDSNIKQEIFDGVFKEHRKVSKKKLLDFLAKEYEEFRIVDVIGLDKENKAFNASLGTYHDLKKILDKDFLDNPDNESILEDIVQTLTLFEDREMIKKRLENYKDLFTESQLKKLYRRHYTGWGRLSAKLINGIRDKESQKTILDYLISDGRANRNFMQLIHDDGLSFKPIIDKAQAGSHSDNLKEVVGELAGSPAIKKGILQSLKIVDELVKVMGYEPEQVVVEMARENQTTNQGRRNTRQRYKLLEEGVKNLASDLNGNILKEYPTDNQALQNERLFLYYLQNGRDMYTGEALDIDNLSQYDIDHIVPQAFIKDDSIDNRVLVSSAKNRGKSDNVPSIDIVKARKAFWKKLLDAKLMSQRKYDNLTKAERGGLTSDDKARFIQRQLVETRQITKHVARILDERFNNELDSKGRRIRKVKIVTLKSNLVSNFRKEFGFYKIREVNDYHHAHDAYLNAVVAKAILTKYPQLEPEFVYGDYPKYNSYKTRKSATEKLFFYSNIMNFFKTKVTLADGTVVVKDDIEVNNDTGEIVWDKKKHFATVRKVLSYPQVNIVKKTEIQTGGFSKESILAHGNSDKLIPRKTKDIYLDPKKYGGFDSPIVAYSVLVVADIKKGKAQKLKTVTELLGITIMERFRFEKNPSAFLESKGYLNIRDDKLMILPKYSLFELENGRRRLLASAGELQKGNELALPTQYMKFLYLASRYNELKGKPEEIEQKQEFVVQHVSYFDDILQIINDFSNRVILADANLEKINKLYQDNKENISVDELANNIINLFTFTSLGAPAAFKFFDKIVDRKRYTSTKEVLNSTLIHQSITGLYETRIDLGKLGED

SEQ ID NO: 633 - protein, 1370 aa, Streptococcus agalactiae
MNKPYSIGLDIGTNSVGYSVVTDDYKVPAKKMRVLGNTDKEYIKKNLIGALLFDGGNTASDRRLKRTARRRYTRRRNRILYLQEIFAEEMSKVDDSFFHRLEDSFLVEDDKRGSKYPIFATMQEEKDYHEKFPTIYHLRKELADKKEKANLRLVYLALAHIIKFRGHFLIEDDSFDVRNTDIQRQYQAFLEIFDTTFENNHLLSQNIDVEGILTDKISKSAKKDRILAQYPNQKSTGIFAEFLKLIVGNQADFKKHFNLEDKTPLQFAKDSYDEDLENLLGQIGDEFADLFSVAKKLYDSVLLSGILTVTDLSTKAPLSASMIQRYDEHREDLKQLKQFVKASLPEKYQEIFTDSSKDGYAGYIEGKTNQGAFYKYLSKLLTKQEGSEYFLEKIKNEDFLRKQRTFDNGSIPHQVHLTELKAIIRRQSEYYPFLKENLDRIEKILTFRIPYYVGPLAREKSDFAWMTRKTDDSIRPWNFEELVDKEASAEAFIHRMTNNDLYLPEEKVLPKHSLIYEKFTVYNELTKVRYKNEQGETYFFDSNIKQEIFDGVFKEHRKVSKKKLLDFLAKEYEEFRIVDVIGLDKENKAFNASLGTYHDLKKILDKDFLDNPDNESILEDIVQTLTLFEDREMIKKRLENYKDLFTESQLKKLYRRHYTGWGRLSAKLINGIRDKESQKTILDYLISDGRANRNFMQLIHDDGLSFKPIIDKAQAGSHSDNLKEVVGELAGSPAIKKGILQSLKIVDELVKVMGYEPEQVVVEMARENQTTNQGRRNTRQRYKLLEEGVKNLASDLNGNILKEYPTDNQALQNERLFLYYLQNGRDMYTGEALDIDNLSQYDIDHIVPQAFIKDDSIDNRVLVSSAKNRGKSDNVPSIDIVKARKAFWKKLLDAKLMSQRKYDNLTKAERGGLTSDDKARFIQRQLVETRQITKHVARILDERFNNELDSKGRRIRKVKIVTLKSNLVSNFRKEFGFYKIREVNDYHHAHDAYLNAVVAKAILTKYPQLEPEFVYGDYPKYNSYKTRKSATEKLFFYSNIMNFFKTKVTLADGTVVVKDDIEVNNDTGEIVWDKKKHFATVRKVLSYPQVNIVKKTEIQTGGFSKESILAHGNSDKLIPRKTKDIYLDPKKYGGFDSPIVAYSVLVVADIKKGKAQKLKTVTELLGITIMERFRFEKNPSAFLESKGYLNIRDDKLMILPKYSLFELENGRRRLLASAGELQKGNELALPTQYMKFLYLASRYNELKGKPEEIEQKQEFVVQHVSYFDDILQIINDFSNRVILADANLEKINKLYQDNKENISVDELANNIINLFTFTSLGAPAAFKFFDKIVDRKRYTSTKEVLNSTLIHQSITGLYETRIDLGKLGED

SEQ ID NO: 634 - protein, 1370 aa, Streptococcus agalactiae
  misc_feature (9)..(9): Xaa can be any naturally occurring amino acid
MNKPYSIGXDIGTNSVGWSIITDDYKVPAKKMRVLGNTDKEYIKKNLIGALLFDGGNTAADRRLKRTARRRYTRRRNRILYLQEIFAEEMSKVDDSFFHRLEDSFLVEEDKRGSKYPIFATLQEEKDYHEKFSTIYHLRKELADKKEKADLRLIYIALAHIIKFRGHFLIEDDSFDVRNTDISKQYQDFLEIFNTTFENNDLLSQNVDVEAILTDKISKSAKKDRILAQYPNQKSTGIFAEFLKLIVGNQADFKKYFNLEDKTPLQFAKDSYDEDLENLLGQIGDEFADLFSAAKKLYDSVLLSGILTVIDLSTKAPLSASMIQRYDEHREDLKQLKQFVKASLPEKYQEIFADSSKDGYAGYIEGKTNQEAFYKYLSKLLTKQEDSENFLEKIKNEDFLRKQRTFDNGSIPHQVHLTELKAIIRRQSEYYPFLKENQDRIEKILTFRIPYYIGPLAREKSDFAWMTRKTDDSIRPWNFEDLVDKEKSAEAFIHRMTNNDFYLPEEKVLPKHSLIYEKFTVYNELTKVRYKNEQGETYFFDSNIKQEIFDGVFKEHRKVSKKKLLDFLAKEYEEFRIVDVIGLDKENKAFNASLGTYHDLEKILDKDFLDNPDNESILEDIVQTLTLFEDREMIKKRLENYKDLFTESQLKKLYRRHYTGWGRLSAKLINGIRDKESQKTILDYLIDDGRSNRNFMQLINDDGLSFKSIISKAQAGSHSDNLKEVVGELAGSPAIKKGILQSLKIVDELVKVMGYEPEQIVVEMARENQTTNQGRRNSRQRYKLLDDGVKNLASDLNGNILKEYPTDNQALQNERLFLYYLQNGRDMYTGEALDIDNLSQYDIDHIIPQAFIKDDSIDNRVLVSSAKNRGKSDDVPSLEIVKDCKVFWKKLLDAKLMSQRKYDNLTKAERGGLTSDDKARFIQRQLVETRQITKHVARILDERFNNELDSKGRRIRKVKIVTLKSNLVSNFRKEFGFYKIREVNNYHHAHDAYLNAVVAKAILTKYPQLEPEFVYGDYPKYNSYKTRKSATEKLFFYSNIMNFFKTKVTLADGTVVVKDDIEVNNDTGEIVWDKKKHFATVRKVLSYPQNNIVKKTEIQTGGFSKESILAHGNSDKLIPRKTKDIYLDPKKYGGFDSPIVAYSVLVVADIKKGKAQKLKTVTELLGITIMERSRFEKNPSAFLESKGYLNIRADKLIILPKYSLFELENGRRRLLASAGELQKGNELALPTQFMKFLYLASRYNESKGKPEEIEKKQEFVNQHVSYFDDILQLINDFSKRVILADANLEKINKLYQDNKENISVDELANNIINLFTFTSLGAPAAFKFFDKIVDRKRYTSTKEVLNSTLIHQSITGLYETRIDLGKLGED

SEQ ID NO: 635 - protein, 1125 aa, Streptococcus anginosus
MNGLVLGLDIGIASVGVGILNKETGEIIHANSRIFPAATADSNVERRGFRQGRRLGRRKKHRSARLNNLFEEFGFITDFSAIPLNLNPYALRVKGLSEELTNEELFIALKNIIKRRGISYLDDASEDGETASNEYGKAVEENRKLLADKTPGQIQLERFEKYGQVRGDFTVVENGENHRLINVFSTSAYKKEAERILRRQQEFNVRISDEFIEAYLTILTGKRKYYHGPGNEKSRTDYGRFRTDGTTLDNIFGILIGKCTFYPDEYRAAKASYTAQEFNLLNDLNNLTVPTETKKLSPEQKRQIVEYARTAKTLGTPTLLKYIAKLVDGSIDDIKGYRIDKSDKPEMHTFDAYRKMRTLDLVNIDALSRETLDDLAHILTLNTESEGILEALNSKMPSTFTKEQIDELIQFRKKNSAVFGKGWHNFSLKLMNELISELYETSEEQMTILTRLGKQRSREISKRTKYIDEKELTEEIYNPVVAKSVRQAIKIINEATKRYGIFDNIVIEMARENNEEDAKKDYIKRQKANQDEKNASMEKAAFQYNGKKELPDSIFHGHKELATKIRLWHQQGERCLYTGKNISIRDLIHNPHQYEIDHILPLSLSFDDGLANKVLVLATANQEKGQRTPFQAIDSMDDAWSYREFKQYVRNSKSLSNKKKDYLLTEEDISKIEVKQKFIERNLVDTRYSSRVVLNTLQEFYKTNDFDTKISVVRGQFTSQLRRKWKIEKSRDTYHHHAVDALIIAASSQLRLWKKQNNPLISYKEGQFVDPETGEILSLTDDEYKELVFRPPYDYFVDTLKSKSFEDSILFSYQVDSKYNRKISDATIYGTRKAQLGKDKQEETYVLGKIKDIYSQKGYEDFIKRYNKDETQFLIYHKDPQTFEKVIEEILKTYPDKELNEKGKEIPCNPFEKYRQENGPIRKYSKKGKGPEIKSLKYYDNKLGNHIDITPVNSQNQVVLQSLKPWRTDVYFNPRTSKYELMGLKYSDLRFEKGSGSYGISPEKYNKVKAKEGVNEDSEFKFTLYKNDLILIKDTETGEQQLFRYGSRNDTSKHYVELKPYEKAKFEGNQQLMNLLGTVAKGGQCLKGINKPNLSIYKVKTDVLGNKYFIKKEGDQPQLNFKKKF

SEQ ID NO: 636 - protein, 1386 aa, Streptococcus anginosus
MNQKYSIGLDIGTNSVGWAVITDDYKVPAKKMKVLGNTDKQSIKKNLLGALLFDSGETAEATRLKRTARRRYTRRRNRLRYLQEIFAEEMMQVDESFFQRLDDSFLVDEDKRGERHPIFGNIAAEVKYHDEFPTIYHLRKHLADISQKADLRLVYLALAHMIKFRGHFLIEGQLKAENTNVQALFKDFVEVYDKTVEESHLSEITVDALSILTEKVSKSRRLENLIAHYPAEKKNTLFGNLIALFLGLQPNFKTNFQLSEDAKLQFSKDTYEEDLEGLLGEVGDEYADLFASAKNLYDAILLSGILTVDDNSTKAPLSASMVKRYEEHQKDLKKFEDFIKVNALDQYNAIFKDKNKKGYAGYIESGVKQDEFYKYLKGILLQINGSGDFLDKIDREDFLRKQRTFDNGSIPHQIHLQEMHAILRRQGEHYPFLKENQDKIEKILTFRIPYYVGPLARKGSRFAWAEYKADEKITPWNFDDILDKEKSAEKFITRMTLNDLYLPEEKVLPKHSLLYETFTVYNELTKVKYVNEQGEAKFFDANMKQEIFDHVFKENRKVTKDKLLNYLNKEFEEFRIVNLTGLDKENKVFNSSLGTYHDLRKILNKSFLDNKENAQIIEDIIQTLTLFEDREMIRQRLQKYSDIFTKAQLKKLERRHYTGWGRLSYKLINGIRNKENKKTILDYLIDDGYANRNFMQLINDDALSFKEEIAKAQIIGDVDDIANVVHDLPGSPAIKKGILQSVKIVDELVKVMGHNPANIIIEMARENQTTDRGRRNSQQRLKLLQDSLKNLDNPVNIKNVENQQLQNDRLFLYYIQNGKDMYTGETLDINNLSQYDIDHIIPQAYIKDDSFDNRVLTSSSENRGKSDNVPSIEVVCARKADWMRLRKAGLISQRKFDNLTKAERGGLTENDKAGFIKRQLVETRQITKHVAQVLDARFNAKHDENKKVIRDVKIITLKSNLVSQFRKDFKFYKVREINDYHHAHDAYLNAVIGTALLKKYPKLASEFVYGEFKKYDVRKFIAKSDKEIGKATAKYFFYSNLMNFFKKEVKFADGTVVERPDIETSEDGEIAWNKQTDFKIVRKVLSYPQVNIVKKTEVQTHGLDRGKPRGLFNANPSPKPKPDSSENLVGVKRNLDPKKYGGYAGISNSYAVLVKAIIEKGVKKKETMVLEFQGISILDRITFEKDKRAFLLGKGYKDIKKIIELPKYSLFELKDGSRRMLASILSTNNKRGEIHKGNELFVPQKFTTLLYHAKRINNPINKDHIEYVKKHRDDFKELLNYVLEFNEKYVGATKNGERLKEAVADFDSKSNEEICTSFLGAVNSKNAGLFELTSLGSASDFEFLGVKIPRYRDYTPSSLLKDSTLIHQSITGLYETRIDLSKLGED

SEQ ID NO: 637 - protein, 1396 aa, Streptococcus anginosus
MTKPYSIGLDIGTNSVGWAVITDDYKVPAKKMKVLGNTNRDYIKKNLLGALLFDGGETAEGRRLKRTARRRYTRRKNRLRYLQEIFAEEMMQVDESFFQRLDDSFLVEEDKQGSKYPIFGTLKEEKEYHKKFKTIYHLREELANSKEKADLRLVYLALAHMIKFRGHFLYEGDLKAENTDVQALFKDFVEEYDKTIEESHLSEITVDALSILTEKVSKSSRLENLIAHYPTEKKNTLFGNLIALSLGLQANFKTNFQLSEDAKLQFSKDTYEEDLEGLLGEVGDEYADLFVSAKNLYDAILLSGILTVDDNSTKAPLSASMVKRYKEHKEELAAFKRFIKEKLPKKYEEIFKDDTKNGYAGYVGADKKLRKRSGKLATEEEFYKYVKGILNKVEGADYFLDKIDREDFLRKQRTFDNGSIPHQIHLQEMHAILRRQGEHYPFLKENQDKIEKILTFRIPYYVGPLARKGSRFAWAEYKADEKITPWNFDDILDKEKSAEKFITRMTLNDLYLPEEKVLPKHSPLYETFTVYNELTKVKYVNEQGEAKFFDTNMKQEIFDHVFKENRKVTKDKLLNYLNKEFEEFRIVNLTGLDKENKAFNASLGTYHDLRKILDKSFLDDKVNEKIIEDIIQTLTLFEDREMIRQRLQKYSDIFTTQQLKELERRHYTGWGRLSYKLINGIRNKENKKTILDYLIDDGYANRNFMQLINDDALSFKEEIARAQIIGDVDDIANVVHDLPGSPAIKKGILQSVKIVDELVKVMGHNPTNIIIEMARENQTTDKGRRNSQQRLKLLQDSLKNLDNPVNIKNVENQQLQNDRLFLYYIQNGKDMYTGETLDINNLSQYDIDHIIPQAFIKDNSLDNRVLTRSDKNRGKSDDVPSIEVVHEMKSFWSKLLSVKLITQRKFDNLTKAERGGLTENDKAGFIKRQLVETRQITKHVAQVLDARFNAKHDENKKVIRDVKIITLKSNLVSQFRKDFKFYKVREINDYHHAHDAYLNAVIGTALLKKYPKLASEFVYGEFKKYDVRKFIAKSDKEIGKATAKYFFYSNLMNFFKKEVKFADGTVVERPDIETSEDGEIAWNKQTDFKIVRKVLSYPQVNIVKKTEVQTHGLDRGKPRGLFNANPSPKPKPDSSENLVGIKRNLDPKKYGGYAGISNSYAVLVKAIIEKGVKKKETMVLEFQGISILDRITFEKDKRAFLLGKGYKDIKKIIELPKYSLFELKDGSRRMLASILSTNNKRGEIHKGNELFVPQKFTTLLYHAKRINNPINKDHIEYVKKHRDDFKELLNYVLEFNEKYVGATKNGERLKEAVADFDSKSNEEICTSFLGAVNSKNAGLFELTSLGSASDFEFLGVKIPRYRDYTPSSLLKDSILIHQSITGLYETRIDLSKLGED

SEQ ID NO: 638 - protein, 1375 aa, Streptococcus canis
MEKKYSIGLDIGTNSVGWAVITDDYKVPSKKFKVLGNTNRKSIKKNLMGALLFDSGETAEATRLKRTARRRYTRRKNRIRYLQEIFANEMAKLDDSFFQRLEESFLVEEDKKNERHPIFGNLADEVAYHRNYPTIYHLRKKLADSPEKADLRLIYLALAHIIKFRGHFLIEGKLNAENSDVAKLFYQLIQTYNQLFEESPLDEIEVDAKGILSARLSKSKRLEKLIAVFPNEKKNGLFGNIIALALGLTPNFKSNFDLTEDAKLQLSKDTYDDDLDELLGQIGDQYADLFSAAKNLSDAILLSDILRSNSEVTKAPLSASMVKRYDEHHQDLALLKTLVRQQFPEKYAEIFKDDTKNGYAGYVGIGIKHRKRTTKLATQEEFYKFIKPILEKMDGAEELLAKLNRDDLLRKQRTFDNGSIPHQIHLKELHAILRRQEEFYPFLKENREKIEKILTFRIPYYVGPLARGNSRFAWLTRKSEEAITPWNFEEVVDKGASAQSFIERMTNFDEQLPNKKVLPKHSLLYEYFTVYNELTKVKYVTERMRKPEFLSGEQKKAIVDLLFKTNRKVTVKQLKEDYFKKIECFDSVEIIGVEDRFNASLGTYHDLLKIIKDKDFLDNEENEDILEDIVLTLTLFEDREMIEERLKTYAHLFDDKVMKQLKRRHYTGWGRLSRKMINGIRDKQSGKTILDFLKSDGFSNRNFMQLIHDDSLTFKEEIEKAQVSGQGDSLHEQIADLAGSPAIKKGILQTVKIVDELVKVMGHKPENIVIEMARENQTTTKGLQQSRERKKRIEEGIKELESQILKENPVENTQLQNEKLYLYYLQNGRDMYVDQELDINRLSDYDVDHIVPQSFIKDDSIDNKVLTRSVENRGKSDNVPSEEVVKKMKNYWRQLLNAKLITQRKFDNLTKAERGGLSEADKAGFIKRQLVETRQITKHVARILDSRMNTKRDKNDKPIREVKVITLKSKLVSDFRKDFQLYKVRDINNYHHAHDAYLNAVVGTALIKKYPKLESEFVYGDYKVYDVRKMIAKSEQEIGKATAKRFFYSNIMNFFKTEVKLANGEIRKRPLIETNGETGEVVWNKEKDFATVRKVLAMPQVNIVKKTEVQTGGFSKESILSKRESAKLIPRKKGWDTRKYGGFGSPTVAYSILVVAKVEKGKAKKLKSVKVLVGITIMEKGSYEKDPIGFLEAKGYKDIKKELIFKLPKYSLFELENGRRRMLASATELQKANELVLPQHLVRLLYYTQNISATTGSNNLGYIEQHREEFKEIFEKIIDFSEKYILKNKVNSNLKSSFDEQFAVSDSILLSNSFVSLLKYTSFGASGGFTFLDLDVKQGRLRYQTVTEVLDATLIYQSITGLYETRTDLSQLGGD

SEQ ID NO: 639 - protein, 1345 aa, Streptococcus constellatus
MGKPYSIGLDIGTNSVGWAVVTDDYKVPAKKMKVLGNTDKQSIKKNLLGALLFDSGETAEATRLKRTARRRYTRRKNRLRYLQEIFTGEMNKVDENFFQRLDDSFLVDEDKRGEHHPIFGNIAAEVKYHDDFPTIYHLRRHLADTSKKADLRLVYLALAHMIKFRGHFLYEGDLKAENTDVQALFKDFVEEYDKTIEESHLSEITVDALSILTEKVSKSSRLENLIAHYPTEKKNTLFGNLIALSLDLHPNFKTNFQLSEDAKLQFSKDTYEEDLEGFLGEVGDEYADLFASAKNLYDAILLSGILTVDDNSTKAPLSASMVKRYEEHQKDLKKLKDFIKVNAPDQYNAIFKDKNKKGYASYIESGVKQDEFYKYLKGILLKINGSGDFLDKIDREDFLRKQRTFDNGSIPHQIHLQEMHAILRRQGEHYPFLKENQDKIEKILTFRIPYYVGPLARKGSRFAWAEYKADEKITPWNFDDILDKEKSAEKFITRMTLNDLYLPEEKVLPKHSPLYEAFTVYNELTKVKYVNEQGEAKFFDTNMKQEIFDHVFKENRKVTKDKLLNYLNKEFEEFRIVNLTGLDKENKAFNSSLGTYHDLRKILDKSFLDDKANEKTIEDIIQTLTLFEDREMIRQRLQKYSDIFTKAQLKKLERRHYTGWGRLSYKLINGIRNKENKKTILDYLIDDGYANRNFMQLINDDALSFKEEIARAQIIDDVDDIANVVHDLPGSPAIKKGILQSVKIVDELVKVMGHNPANIIIEMARENQTTDKGRRNSQQRLKLLQDSLKNLDNPVNIKNVENQQLQNDRLFLYYIQNGKDMYTGETLDINNLSQYDIDHIIPQAFIKDNSLDNRVLTRSDKNRGKSDDVPSIEVVHEMKSFWSKLLSVKLITQRKFDNLTKAERGGLTEEDKAGFIKRQLVETRQITKHVAQILDERFNTEFDGNKRRIRNVKIITLKSNLVSNFRKEFELYKVREINDYHHAHDAYLNAVVGNALLLKYPQLEPEFVYGEYPKYNSYRSRKSATEKFLFYSNILRFFKKEDIQTNEDGEIAWNKEKHIKILRKVLSYPQVNIVKKTEEQTGGFSKESILPKGESDKLIPRKTKNSYWDPKKYGGFDSPVVAYSILVFADVEKGKSKKLRKVQDMVGITIMEKKRFEKNPVDFLEQRGYRNVRLEKIIKLPKYSLFELENKRRRLLASAKELQKGNELVIPQRFTTLLYHSYRIEKDYEPEHREYVEKHKDEFKELLEYISVFSRKYVLADNNLTKIEMLFSKNKDAEVSSLAKSFISLLTFTAFGAPAAFNFFGENIDRKRYTSVTECLNATLIHQSITGLYETRIDLSKLGED

SEQ ID NO: 640 - protein, 538 aa, Streptococcus dysgalactiae
DYDVDHIVPQSFIKDDSIDNKVLTRSDKNRGKSDNVPSEEVVKKMKNYWRQLLNAKLITQRKFDNLTKAERGGLSELDKAGFIKRQLVETRQITKHVAQILDSRMNTKYDENDKLIREVKVITLKSKLVSDFRKDFQFYKVREINNYHHAHDAYLNAVVGTALIKKYPKLESEFVYGDYKVYDVRKMIAKSEQEIGKATAKRFFYSNIMNFFKTEITLANGEIRKRPLIETNEETGEIVWDKGRDFATVRKVLSMPQVNIVKKTEVQTGALTNESIYARGSFDKLISRKHRFESSKYGGFGSPTVTYSVLVVAKSKVQDGKVKKIKTGKELIGITLLDKLVFEKNPLKFIEDKGYGNVQIDKCIRLPKYSLFEFENGTRRMLASVMANNNSRGDLQKANEMFLPAKLVTLLYHAHKIESSKELEHEAYILDHYNDLYQLLSYIERFASLYVDVEKNISKVKELFSNIESYSISEICSSVINLLTLTASGAPADFKFLGTTIPRKRYGSPQSILSSTLIHQSITGLYETRIDLSQLGGD

SEQ ID NO: 641 - protein, 1155 aa, Streptococcus dysgalactiae
MDKKYSIGLDIGTNSVGWAVITDDYKVPSKKFKVLGNTDRHSIKKNLIGALLFDSGETAEATRLKRSARRRYTRRKNRIRYLQEIFSSEMSKVDDSFFHRLEESFLVEEDKKHERHPIFGNIVDEVAYHEKYPTIYHLRKKLADSTDKADLRLIYLALAHMIKFRGHFLIEGDLNPDNSDMDKLFIQLVQTYNQLFEENPINASRVDAKAILSARLSKSRRLENLIAQLPGEKRNGLFGNLIALSLGLTPNFKSNFDLAEDAKLQLSKDTYDDDLDNLLAQIGDQYADLFLAAKNLSDAILLSDILRVNSEITKAPLSASMIKRYDEHHQDLTLLKALVRQQLPEKYKEIFFDQSKNGYAGYIDGGASQEEFYKFIKPILEKMDGTEELLAKLNREDLLRKQRTFDNGSIPHQIHLGELHAILRRQEDFYPFLKDNREKIEKILTFRIPYYVGPLARGNSRFAWMTRKSEETITPWNFEEVVDKGASAQSFIERMTNFDKNLPNEKVLPKHSLLYEYFTVYNELTKVKYVTEGMRKPEFLSGKQKEAIVDLLFKTNRKVTVKQLKEDYFKKIECFDSVEISGVEDRFNASLGTYHDLLKIIKDKDFLDNEENEDILEDIVLTLTLFEDKEMIEERLKTYAHLFDDKVMKQLKRRHYTGWGRLSRKLINGIRDKQSGKTILDFLKSDGFANRNFIQLIHDDSLTFKEAIQKAQVSGQGHSLHEQIANLAGSPAIKKGILQSVKVVDELVKVMGHKPENIVIEMARENQTTQKGQKNSRERMKRIEEGIKELGSQILKEHPVENTQLQNEKLYLYYLQNRRDMYVDQELDINRLSDYDVDHIVPQSFIKDDSIDNKVLTRSDKNRGKSDDVPSEEVVKKMKNYWRQLLNAKLITQRKFDNLTKAERGGLSELDKAGFIKRQLVETRQITKHVAQILDSRMNTKYDENDKLIREVKVITLKSKLVSDFRKDFQFYKVREINNYHHAHDAYLNAVVGTALIKKYPKLESEFVYGDYKVYDVRKMIAKSEQEIGKATAKRFFYSNIMNFFKTEITLANGEIRKRPLIETNEETGEIVWDKGRDFATVRKVLSMPQVNIVKKTEVQTGALTNESIYARGSFDKLISRKHRFESSKYGGFGSPTVTYSVLVVAKYQSYKMEK

SEQ ID NO: 642 - protein, 1371 aa, Streptococcus dysgalactiae
MDKKYSIGLDIGTNSVGWAVITDDYKVPSKKFKVLGNTDRHSIKKNLIGALLFDSGETAEATRLKRTARRRYTRRKNRIRYLQEIFSSEMSKVDDSFFHRLEESFLVEEDKKHERHPIFGNIVDEVAYHEKYPTIYHLRKKLADSTDKADLRLIYLALAHMIKFRGHFLIEGDLNPDNSDMDKLFIQLVQTYNQLFEENPINASRVDAKAILSARLSKSRRLENLIAQLPGEKRNGLFGNLIALSLGLTPNFKSNFDLAEDAKLQLSKDTYDDDLDNLLAQIGDQYADLFLAAKNLSDAILLSDILRVNSEITKAPLSASMIKRYDEHHQDLTLLKALVRQQLPEKYKEIFFDQSKNGYAGYIDGGASQEEFYKFIKPILEKMDGTEELLAKLNREDLLRKQRTFDNGSIPHQIHLGELHAILRRQEDFYPFLKDNREKIEKILTFRIPYYVGPLARGNSRFAWMTRKSEETITPWNFEEVVDKGASAQSFIERMTNFDKNLPNEKVLPKHSLLYEYFTVYNELTKVKYVTEGMRKPEFLSGKQKEAIVDLLFKTNRKVTVKQLKEDYFKKIECFDSVEISGVEDRFNASLGTYHDLLKIIKDKDFLDNEENEDILEDIVLTLTLFEDKEMIEERLKTYAHLFDDKVMKQLKRRHYTGWGRLSRKLINGIRDKQSGKTILDFLKSDGFANRNFIQLIHDDSLTFKEAIQKAQVSGQGHSLHEQIANLAGSPAIKKGILQSVKVVDELVKVMGHKPENIVIEMARENQTTQKGQKNSRERMKRIEEGIKELGSQILKEHPVENTQLQNEKLYLYYLQNGRDMYVDQELDINRLSDYDVDHIVPQSFIKDDSIDNKVLTRSDKNRGKSDDVPSEEVVKKMKNYWRQLLNAKLITQRKFDNLTKAERGGLSELDKAGFIKRQLVETRQITKHVAQILDSRMNTKYDENDKLIREVKVITLKSKLVSDFRKDFQFYKVREINNYHHAHDAYLNAVVGTALIKKYPKLESEFVYGDYKVYDVRKMIAKSEQEIGKATAKRFFYSNIMNFFKTEITLANGEIRKRPLIETNEETGEIVWNKGRDFATVRKVLSMPQVNIVKKTEVQTGALTNESIYARGSFDKLISRKHRFESSKYGGFGSPTVTYSVLVVAKSKVQDGKVKKIKTGKELIGITLLDKLVFEKNPLKFIEDKGYGNVQIDKCIKLPKYSLFEFENGTRRMLASVMANNNSRGDLQKANEMFLPAKLVTLLYHAHKIESSKELEHEAYILDHYNDLYQLLSYIERFASLYVDVEKNISKVKELFSNIESYSISEICSSVINLLTLTASGAPADFKFLGTTIPRKRYGSPQSILSSTLIHQSITGLYETRIDLSQLGGD

SEQ ID NO: 643 - protein, 1371 aa, Streptococcus dysgalactiae
MDKKYSIGLDIGTNSVGWAVITDDYKVPSKKFKVLGNTDRHSIKKNLIGALLFDSGETAEATRLKRTARRRYTRRKNRIRYLQEIFSSEMSKVDDSFFHRLEESFLVEEDKKHERHPIFGNIVDEVAYHEKYPTIYHLRKKLADSTDKADLRLIYLALAHMIKFRGHFLIEGDLNPDNSDMDKLFIQLVQTYNQLFEENPINASRVDAKAILSARLSKSRRLENLIAQLPGEKRNGLFGNLIALSLGLTPNFKSNFDLAEDAKLQLSKDTYDDDLDNLLAQIGDQYADLFLAAKNLSDAILLSDILRVNSEITKAPLSASMIKRYDEHHQDLTLLKALVRQQLPEKYKEIFFDQSKNGYAGYIDGGASQEEFYKFIKPILEKMDGTEELLAKLNREDLLRKQRTFDNGSIPHQIHLGELHAILRRQEDFYPFLKDNREKIEKILTFRIPYYVGPLARGNSRFAWMTRKSEETITPWNFEEVVDKGASAQSFIERMTNFDKNLPNEKVLPKHSLLYEYFTVYNELTKVKYVTEGMRKPEFLSGKQKEAIVDLLFKTNRKVTVKQLKEDYFKKIECFDSVEISGVEDRFNASLGTYHDLLKIIKDKDFLDNEENEDILEDIVLTLTLFEDKEMIEERLKKYANLFDDKVMKQLKRRHYTGWGRLSRKLINGIRDKQSGKTILDFLKSDGFANRNFMQLINDDSLTFKEAIQKAQVSGQGHSLHEQIANLAGSPAIKKGILQSVKVVDELVKVMGHKPENIVIEMARENQTTQKGQKNSRERMKRIEEGIKELGSQILKEHPVENTQLQNEKLYLYYLQNGRDMYVDQELDINRLSDYDVDHIVPQSFIKDDSIDNKVLTRSDKNRGKSDNVPSEEVVKKMKNYWRQLLNAKLITQRKFDNLTKAERGGLSELDKAGFIKRQLVETRQITKHVAQILDSRMNTKYDENDKLIREVKVITLKSKLVSDFRKDFQFYKVREINNYHHAHDAYLNAVVGTALIKKYPKLESEFVYGDYKVYDVRKMIAKSEQEIGKATAKRFFYSNIMNFFKTEITLANGEIRKRPLIETNEETGEIVWDKGRDFATVRKVLSMPQVNIVKKTEVQTGALTNESIYARGSFDKLISRKHRFESSKYGGFGSPTVTYSVLVVAKSKVQDGKVKKIKTGKELIGITLLDKLVFEKNPLKFIEDKGYGNVQIDKCIKLPKYSLFEFENGTRRMLASVMANNNSRGDLQKANEMFLPAKLVTLLYHAHKIESSKELEHEAYILDHYNDLYQLLSYIERFASLYVDVEKNISKVKELFSNIESYSISEICSSVINLLTLTASGAPADFKFLGTTIPRKRYGSPQSILSSTLIHQSITGLYETRIDLSQLGGD

SEQ ID NO: 644 - protein, 1371 aa, Streptococcus dysgalactiae
MDKKYSIGLDIGTNSVGWAVITDDYKVPSKKFKVLGNTDRHSIKKNLIGALLFDSGETAEATRLKRTARRRYTRRKNRIRYLQEIFSSEMSKVDDSFFHRLEESFLVEEDKKHERHPIFGNIVDEVAYHEKYPTIYHLRKKLADSTDKADLRLIYLALAHMIKFRGHFLIEGDLNPDNSDVDKLFIQLVQTYNQLFEEKPINASGVDAKAILSARLSKSKRLENLIAQLPGEKKNGLFGNLIALSLGLTPNFKSNFDLAEDAKLQLSKDTYDDDLDNLLAQIGNQYADLFLAAKNLSDAILLSDILRVNSEITKAPLSASMIKRYDEHHQDLTLLKALVRQQLPEKYKEIFFDQSKNGYAGYIDGGASQEEFYKFIKPILEKMDGTEELLAKLNREDLLRKQRTFDNGSIPHQIHLGELHAILRRQEDFYPFLKDNREKIEKILTFRIPYYVGPLARGNSRFAWMTRKSEETITPWNFEEVVDKGASAQSFIERMTNFDKNLPNEKVLPKHSLLYEYFTVYNELTKVKYVTEGMRKPEFLSGKQKEAIVDLLFKTNRKVTVKQLKEDYFKKIECFDSVEISGVEDRFNASLGTYHDLLKIIKDKDFLDNEENEDILEDIVLTLTLFEDKEMIEERLKKYANLFDDKVMKQLKRRHYTGWGRLSRKLINGIRDKQSGKTILDFLKSDGFANRNFMQLINDDSLTFKEAIQKAQVSGQGHSLHEQIANLAGSPAIKKGILQSVKVVDELVKVMGHKPENIVIEMARENQTTQKGQKNSRERMKRIEEGIKELGSQILKEHPVENTQLQNEKLYLYYLQNGRDMYVDQELDINRLSDYDVDHIVPQSFIKDDSIDNKVLTRSDKNRGKSDNVPSEEVVKKMKNYWRQLLNAKLITQRKFDNLTKAERGGLSELDKAGFIKRQLVETRQITKHVAQILDSRMNTKYDENDKLIREVKVITLKSKLVSDFRKDFQFYKVREINNYHHAHDAYLNAVVGTALIKKYPKLESEFVYGDYKVYDVRKMIAKSEQEIGKATAKRFFYSNIMNFFKTEITLANGEIRKRPLIETNEETGEIVWDKGRDFATVRKVLSMPQVNIVKKTEVQTGALTNESIYARGSFDKLISRKHRFESSKYGGFGSPTVTYSVLVVAKSKVQDGKVKKIKTGKELIGITLLDKLVFEKNPLKFIEDKGYGNVQIDKCIKLPKYSLFEFENGTRRMLASVMANNNSRGDLQKANEMFLPAKLVTLLYHAHKIESSKELEHEAYILDHYNDLYQLLSYIERFASLYVDVEKNISKVKELFSNIESYSISEICSSVINLLTLTASGAPADFKFLGTTIPRKRYGSPQSILSSTLIHQSITGLYETRIDLSQLGGD

SEQ ID NO: 645 - protein, 1370 aa, Streptococcus gallolyticus; identical to SEQ ID NO: 204

SEQ ID NO: 646 - protein, 1375 aa, Streptococcus infantarius
MEKSYSIGLDIGTNSVGWAVITDDYKVPAKKMKVLGNTDKKYIKKNLLGALLFDSGETAEVTRLKRTARRRYTRRKNRLRYLQEIFAKEMTKVDESFFQRLEESFLTDDDKTFDSHPIFGNKAEEDAYHQKFPTIYHLRKYLADSQEKADLRLVYLALAHMIKYRGHFLIEGELNAENTDVQKLFNVFVETYDKIVDESHLSEIEVDASSILTEKVSKSRRLENLIKQYPTEKKNTLFGNLIALALGLQPNFKTNFKLSEDAKLQFSKDTYEEDLEELLGKVGDDYADLFISAKNLYDAILLSGILTVDDNSTKAPLSASMIKRYVEHHEDLEKLKEFIKINKLKLYHDIFKDKTKNGYAGYIDNGVKQDEFYKYLKTILTKIDDSDYFLDKIERDDFLRKQRTFDNGSIPHQIHLQEMHSILRRQGDYYPFLKENQAKIEKILTFRIPYYVGPLARKDSRFAWANYHSDEPITPWNFDEVVDKEKSAEKFITRMTLNDLYLPEEKVLPKHSHVYETFTVYNELTKIKYVNEQGESFFFDANMKQEIFDHVFKENRKVTKAKLLSYLNNEFEEFRINDLIGLDKDSKSFNASLGTYHDLKKILDKSFLDDKTNGQIIEDIVLTLTLFEDRDMIHERLQKYSDFFTSQQLKKLERRHYTGWGRLSYKLINGIRNKENNKTILDFLIDDGHANRNFMQLINDESLSFKTIIQEAQVVGDVDDIEAVVHDLPGSPAIKKGILQSVKIVDELVKVMGDNPDNIVIEMARENQTTGYGRNKSNQRLKRLQDSLKEFGSDILSKKKPSYVDSKVENSHLQNDRLFLYYIQNGKDMYTGEELDIDRLSDYDIDHIIPQAFIKDNSIDNKVLTSSAKNRGKSDDVPSIEIVRNRRSYWYKLYKSGLISKRKFDNLTKAERGGLTEADKAGFIKRQLVETRQITKHVAQILDARFNTKRDENDKVIRDVKVITLKSNLVSQFRKEFKFYKVREINDYHHAHDAYLNAVVGTALLKKYPKLTPEFVYGEYKKYDVRKLIAKSSDDYSEMGKATAKYFFYSNLMNFFKTEVKYADGRVFERPDIETNADGEVVWNKQKDFDIVRKVLSYPQVNIVKKVEAQTGGFSKESILSKGDSDKLIPRKTKKVYWNTKKYGGFDSPTVAYSVLVVADIEKGKAKKLKTVKELVGISIMERSFFEENPVSFLEKKGYHNVQEDKLIKLPKYSLFEFEGGRRRLLASATELQKGNEVMLPAHLVELLYHAHRIDSFNSTEHLKYVSEHKKEFEKVLSCVENFSNLYVDVEKNLSKVRAAAESMTNFSLEEISASFINLLTLTALGAPADFNFLGEKIPRKRYTSTKECLSATLIHQSVTGLYETRIDLSKLGEE

SEQ ID NO: 647 - protein, 1368 aa, Streptococcus iniae
MRKPYSIGLDIGTNSVGWAVITDDYKVPSKKMRIQGTTDRTSIKKNLIGALLFDNGETAEATRLKRTTRRRYTRRKYRIKELQKIFSSEMNELDIAFFPRLSESFLVSDDKEFENHPIFGNLKDEITYHNDYPTIYHLRQTLADSDQKADLRLIYLALAHIIKFRGHFLIEGNLDSENTDVHVLFLNLVNIYNNLFEEDIVETASIDAEKILTSKTSKSRRLENLIAEIPNQKRNMLFGNLVSLALGLTPNFKTNFELLEDAKLQISKDSYEEDLDNLLAQIGDQYADLFIAAKKLSDAILLSDIITVKGASTKAPLSASMVQRYEEHQQDLALLKNLVKKQIPEKYKEIFDNKEKNGYAGYIDGKTSQEEFYKYIKPILLKLDGTEKLISKLEREDFLRKQRTFDNGSIPHQIHLNELKAIIRRQEKFYPFLKENQKKIEKLFTFKIPYYVGPLANGQSSFAWLKRQSNESITPWNFEEVVDQEASARAFIERMTNFDTYLPEEKVLPKHSPLYEMFMVYNELTKVKYQTEGMKRPVFLSSEDKEEIVNLLFKKERKVTVKQLKEEYFSKMKCFHTVTILGVEDRFNASLGTYHDLLKIFKDKAFLDDEANQDILEEIVWTLTLFEDQAMIERRLVKYADVFEKSVLKKLKKRHYTGWGRLSQKLINGIKDKQTGKTILGFLKDDGVANRNFMQLINDSSLDFAKIIKNEQEKTIKNESLEETIANLAGSPAIKKGILQSIKIVDEIVKIMGQNPDNIVIEMARENQSTMQGIKNSRQRLRKLEEVHKNTGSKILKEYNVSNTQLQSDRLYLYLLQDGKDMYTGKELDYDNLSQYDIDHIIPQSFIKDNSIDNTVLTTQASNRGKSDNVPNIETVNKMKSFWYKQLKSGAISQRKFDHLTKAERGALSDFDKAGFIKRQLVETRQITKHVAQILDSRFNSNLTEDSKSNRNVKIITLKSKMVSDFRKDFGFYKLREVNDYHHAQDAYLNAVVGTALLKKYPKLEAEFVYGDYKHYDLAKLMIQPDSSLGKATTRMFFYSNLMNFFKKEIKLADDTIFTRPQIEVNTETGEIVWDKVKDMQTIRKVMSYPQVNIVMKTEVQTGGFSKESIWPKGDSDKLIARKKSWDPKKYGGFDSPIIAYSVLVVAKIAKGKTQKLKTIKELVGIKIMEQDEFEKDPIAFLEKKGYQDIQTSSIIKLPKYSLFELENGRKRLLASAKELQKGNELALPNKYVKFLYLASHYTKFTGKEEDREKKRSYVESHLYYFDEIMQIIVEYSNRYILADSNLIKIQNLYKEKDNFSIEEQAINMLNLFTFTDLGAPSAFKFFNGDIDRKRYSSTNEIINSTLIYQSPTGLYETRIDLSKLGGK

SEQ ID NO: 648 - protein, 1392 aa, Streptococcus mitis
MNNNNYSIGLDIGTNSVGWAVITDDYKVPSKKMKVLGNTDKHFIKKNLIGALLFDEGATAEDRRFKRTARRRYTRRKNRLRYLQEIFSEEMSKVDSSFFHRLDDSFLVPEDKRGSKYPIFATLAEEKEYHKKFPTIYHLRKHLADSKEKTDLRLIYLALAHMIKYRGHFLYEESFDIKNNDIQKIFSEFISIYDNTFEGSSLSGQNAQVEAIFTDKISKSAKRERILKLFAYEKSTDLFSEFLKLIVGNQADFKKHFDLEEKAPLQFSKDTYDEDLENLLGQIGDDFADLFLVAKKLYDAILLSGILTVTDSSTKAPLSASMIERYENHQKDLAALKQFIQNNLQEKYDEVFSDQSKDGYARYINGKTTQEAFYKYIKNLLSKFEGSDYFLDKIEREDFLRKQRTFDNGSIPHQIHLQEMNAIIRRQGEHYPFLKEYKEKIETILTFRIPYYVGPLARGNRNFAWLTRNSDQAIRPWNFEEIVDQASSAEEFINKMTNYDLYLPEEKVLPKHSLLYETFAVYNELTKVKFISEGLRDYQFLDSGQKKQIVNQLFKEKRKVTEKDIIQYLHNVDGYDGIELKGIEKQFNASLSTYHDLLKIIKDKEFMDDPKNEEILENIVHTLTIFEDREMIKQRLAQYASIFDKKVIKALTRRHYTGWGKLSAKLINGICDKKTGKTILDYLIDDGYSNRNFMQLINDDGLSFKDIIQKAQVVGKTNDVKQVVQELPGSPAIKKGILQSIKLVDELVKVMGHAPESIVIEIARENQTTARGKKNSQQRYKRIEDALKNLAPGLDSNILKEHPTDNIQLQNDRLFLYYLQNGKDMYTGEALDINQLSSYDIDHIVPQAFIKDDSLDNRVLTSSKDNRGKSDNVPSLEVVQKRKAFWQQLLDSKLISEHKFNNLTKAERGGLDERDKVGFIRRQLVETRQITKHVAQILDARFNTEVNEKDKKNRTVKIITLKSNLVSNFRKEFKLYKVREINDYHHAHDAYLNAVVAKAILKKYPKLEPGFVYGDYQKYDIKRYISRSKDPKEVEKATEKYFFYSNLLNFFKEEVHYADGTIVKRENIEYSKDTGEIAWNKEKDFATIKKVLSLPQVNIVKKTEIQTHGLDRGKPRGLFNSNPSPKPSEDRKENLVPIKQGLDPRKYGGYAGISNSYAVLVKAIIEKGAKKQQKTVLEFQGISILDKINFEKNKENYLLEKGYIKILSTITLPKYSLFEFPDGTRRRLASILSTNNKRGEIHKGNELVIPEKYTTLLYHAKNINKTLEPEHLEYVEKHRNDFAKLLEYVLNFNDKYVGALKNGERIRQAFIDWETVDIEKLCFSFIGPRNSKNAGLFELTSQGSASDFEFLGVKIPRYRDYTPSSLLNATLIHQSITGLYETRIDLSKLGED

SEQ ID NO: 649 - protein, 1134 aa, Streptococcus mutans
MANGKILGLDIGIASVGVGIIDKETGKIIHVNSRIFPAATADSNVERRGFRQGRRLVRRKKHRKVRLADLFLDSNLLTDFSKVSLNLNPYQLRVKGLNEELSNEELFIALKSIVSRRGISYLDDASEDSGANSSEYGKAVEENRKLLEDRTPGQIQLERFEKYGKVRGDFTVVENGENHRLINVFSTSAYKKEAERILRRQQEFNMRIADEFIEAYLTILTGKRKYYHGPGNEKSRTDYGRFRTDGTTLDNIFGILIGKCTFYPDEYRAAKASYTAQEFNLLNDLNNLTVPTETKKLSEEQKRQIIEHAKTVKTLGAPTLLKYIVKLVGCSADDIKGYRIDKSDKPEIHTFEAYRKMRTMELIKVDDLSRESLDALAHILTLNTEREGIEEAIRDRFTNKEFNQEQINELVLFRKNNSSLFGKGWHNFSLKLMKELIPELYETSEEQMTILTRLGKQRVKKSSNRTNYIDEKELTEEIYNPVVAKSVRQAIKIINLATKKYGVFDNIVIEMARESNEDDEKKAIQNAQKANEDEKKAALLKAAHQFNGKEELPDSIFHGHKELLTKIRLWHQQGEKCLYTGKTIFINDLIHNPYKYEIDHILPLSLSFDDSLANKVLVLSTANQEKGQRTPFQSLDSMDGAWTYREFKSYVKGLKTLSNKKKDYLLTEENIDKIEVKQKFIERNLVDTRYSSRVVLNALQDFYKERKFDTKISVVRGQFTSQLRRKWRIEKTRETYHHHAVDALIIAASSQLNLWKKQNNPLISYKEDQFVDPETGEILSLSDDEYKKLVFKAPYEHFVDTLKSKKFEDSILFSYQVDSKYNRKISGATICGTRKAQLGKDTQEETYVLGKIKDIYSQKGYEDFIKKYKKDKTQFLMYHKDPQTFEKVIEEILKTYPDKELNEKGKEVSCNPFEKYRQENGPVRKYSKKGNGPEIKSLKYYDEVLGKNIDITPKNSLNKVVLRSLNPWRTDVYFNHETRKYEFLGLKYSDLRYLKGEHRYGILIGDYKKIKDKEGIEKESEFKFTLYKNDLILIKDTAKGKEELFRFWSRTGKDNAKTFEKNKIELKPYSKSQFEKGEDTNVLGKLYASSNQLQKSFGTLENLSIYKVRTDVLGNKYFIKKEGDKPQLNFKKKL

SEQ ID NO: 650 - protein, 1134 aa, Streptococcus mutans; identical to SEQ ID NO: 649

SEQ ID NO: 651 - protein, 1128 aa, Streptococcus mutans
MANSKILGLDIGIASVGVGIIDKETGKIIHVNSRIFPAATADSNVERRGFRQGRRLVRRKKHRKVRLADLFLDSNLLTDFSKVSLNLNPYQLRVKGLNEELSNEELFIALKSIVSRRGISYLDDASEDSGANSSEYGKAVEENRKLLEDRTPGQIQLERFEKYGKVRGDFTVVENGENHRLINVFSTSAYKKEAERILRRQQEFNIRIADEFIEAYLTILTGKRKYYHGPGNEKSRTDYGRFRTDGTTLDNIFGILIGKCTFYPDEYRAAKASYTAQEFNLLNDLNNLTVPTETKKLSEEQKRQIIEHAKTVKTLGAPTLLKYIAKLVGCSADDIKGYRIDKSDKPEIHTFEAYRKMRTMELIKVADLSRESLDALAHILTLNTEREGIEEAIRDRFTNKEFNQEQINELVLFRKNNSSLFGKGWHNFSLKLMKELIPELYETSEEQMTILTRLGKQRVKKSSNRTNYIDEKELTEEIYNPVVAKSVRQAIKIINLATKKYGVFDNIVIEMARESNEDDEKKAIQNAQKANEDEKEAALLKAAHQFNGKEELPDSIFHGHKELLTKIRLWHQQGEKCLYTGKTIFINDLIHNPYKYEIDHILPLSLSFDDSLANKVLVLSTANQEKGQRTPFQSLDSMDGAWTYREFKAYVKGLKTLSNKKKDYLLNEEDINKNEVKQKFIERNLVDTRYSSRVVLNTLQDFYKKREFDTKISVVRGQFTSQIRRKWRIEKTRETYHHHAVDALIIAASSQLNLWKKQNNPLISYKEDQFVDPETGEILSLSDDEYKELVFKAPYDHFVDTLKSKKFEDSILFSYQVDSKYNRKISDATIYGTRKARLGKDSQEETYVLGKIKDIYSQKGYEDFIKKYKKDKTQFLMYHKDPQTFEKVIEEILKTYSDKELNEKGKEVPCNPFEKYRQENGPVRKYSKKGNGPEIKSIKYYDNKLGNHIDITPNNSHHQVVLQSLKPWRTDVYFNPKSGKYELMGLKYSDLRFEKVSGDYGISVKKYNEIKSKEGVDENSEFKFTLYKNDLILIKDTESGEQELFRFLSRTMPNQKHYVELKPYDKSKFEGHQKLMDIFGEVAKGGQCLKGLNKSNISIYKVKTDVLGNKYFIKKEGDQPQLNFKKKI

SEQ ID NO: 652 - protein, 1128 aa, Streptococcus mutans; identical to SEQ ID NO: 651

SEQ ID NO: 653 - protein, 1338 aa, Streptococcus mutans
MDLIGTNSVGWAVVTDDYKVPAKKMKVLGNTDKSHIKKNLLGALLFDSGNTAADRRLKRTARRRYTRRRNRILYLQEIFAEEMSKVDDSFFHRLEDSFLVTEDKRGERHPIFGNLEEEVKYHENFPTIYHLRQYLADNPEKVDLRLVYLALAHIIKFRGHFLIEGKFDTRNNDVQRLFQEFLAVYDNTFENSSLQEQNVQVEEILTDKISKSAKKDRVLKLFPNEKSNGRFAEFLKLIVGNQADFKKHFELEEKAPLQFSKDTYEEELEVLLAQIGDNYAELFLSAKKLYDSILLSGILTVTDVSTKAPLSASMIQRYNEHQMDLAQLKQFIRQKLSDKYNEVFSDVSKDGYAGYIDGKTNQEAFYKYLKGLLNKIEGSGYFLDKIEREDFLRKQRTFDNGSIPHQIHLQEMRAIIRRQAEFYPFLADNQDRIEKILTFRIPYYVGPLARGKSDFAWLSRKSADKITPWNFDEIVDKESSAEAFINRMTNYDLYLPNQKVLPKHSLLYEKFTVYNELTKVKYKTEQGKTAFFDANMKQEIFDGVFKVYRKVTKDKLMDFLEKEFDEFRIVDLTGLDKENKAFNASYGTYHDLRKILDKDFLDNSKNEKILEDIVLTLTLFEDREMIRKRLENYSDLLTKEQVKKLERRHYTGWGRLSAELIHGIRNKESRKTILDYLIDDGNSNRNFMQLINDDALSFKEEIAKAQVIGETDNLNQVVSDIAGSPAIKKGILQSLKIVDELVKIMGHQPENIVVEMARENQFTNQGRRNSQQRLKGLTDSIKEFGSQILKEHPVEHSQLQNDRLFLYYLQNGRDMYTGEELDIDYLSQYDIDHIIPQAFIKDNSIDNRVLTSSKENRGKSDDVPSKNVVRKMKSYWSKLLSAKLITQRKFDNLTKAERGGLTDDDKAGFIKRQLVETRQITKHVARILDERFHTETDENNKKIRQVKIVTLKSNLVSNFRKEFELYKVREINDYHHAHDAYLNAVIGKALLGVYPQLEPEFVYGDYPHFHGHKENKATAKKFFYSNIMNFFKKDDVRTDKNGEIIWKKDEHISNIKKVLSYPQVNIVKKVEEQTGGFSKESILPKGNSDKLIPRKTKKFYWDTKKYGGFDSPIVAYSILVIADIEKGKSKKLKTVKALVGVTIMEKMTFERDPVAFLERKGYRNVQEENIIKLPKYSLFKLENGRKRLLASARELQKGNEIVLPNHLGTLLYHAKNIHKVDEPKHLDYVDKHKDEFKELLDVVSNFSKKYTLAEGNLEKIKELYAQNNGEDLKELASSFINLLTFTAIGAPATFKFFDKNIDRKRYTSTTEILNATLIHQSITGLYETRIDLSKLGGD

SEQ ID NO: 654 - protein, 1338 aa, Streptococcus mutans; identical to SEQ ID NO: 653

SEQ ID NO: 655 - protein, 1345 aa, Streptococcus mutans
MKKPYSIGLDIGTNSVGWAVVTDDYKVPAKKMKVLGNTDKSHIEKNLLGALLFDSGNTAEDRRLKRTARRRYTRRRNRILYLQEIFSEEMGKVDDSFFHRLEDFFLVTEDKRGERHPIFGNLEEEVKYHENFPTIYHLRQYLADNPEKVDLRLVYLALAHIIKFRGHFLIEGKFDTRNNDVQRLFQEFLAVYDNTFENSSLQEQNVQVEEILTDKISKSAKKDRVLKLFPNEKSNGRFAEFLKLIVGNQADFKKHFELEEKAPLQFSKDTYEEELEVLLAQIGDNYAELFLSAKKLYDSILLSGILTADDSSTKAPLSASMIQRYNEHQMDLAQLKQFIRQKLSDKYNEVFSDVSKDGYAGYIDGKTNQEAFYKYLKGLLNKIEGSGYFLDKIEREDFLRKQRTFDNGSIPHQIHLQEMRAIIRRQSEFYPFLADNQDRIEKILTFRIPYYVGPLARGKSDFAWLSRKSADKITPWNFDEIVDKESSAEAFINRMTNYDLYLPNQKVLPKHSLLYEKFTVYNELTKVKYKTEQGETAFFDANMKQEIFDGVFKVYRKVTKDKLMDFLEKEFDEFRIVDLTGLDKENKAFNASYGTYHDLRKILDKDFLDNSKNEKILEDIVLTLTLFEDREMIRKRLKNYSDLLTKEQLKKLERRHYTGWGRLSAELIHGIRNKESRKTILDYLIDDGNSNRNFMQLINDDALSFKEEIAKAQVIGETDNLNQVVSDIAGSPAIKKGILQSLKIVDELVKIMGHQPENIVVEMARENQFTNQGRRNSQQRLKGLTDSIKEFGSQILKEHPVENSQLQNDRLFLYYLQNGRDMYTGEELDIDYLSQYDIDHIIPQAFIKDNSIDNRVLTSSKENRGKSDDVPSKDVVRKMKPYWSKLLSAKLITQRKFDNLTKAERGGLTDDDKAGFIKRQLVETRQITKHVARILDERFNTETDENNKKIRQVKIVTLKSNLVSNFRKEFELYKVREINDYHHAHDAYLNAVIGKALLGVYPQLEPEFVYGDYPHFHGHEENKATAKKFFYSNIMNFFKKDDVRTDKNGEIIWKKDEHISNIKKVLSYPQVNIVKKVEEQTGGFSKESILPKGNSDKLIPRKTKKFYWDTKKYGGFDSPIVAYSILVIADIEKGKSKKLKTVKALVGVTIMEKMTFERDPVAFLERKGYRNVQEENIIKLPKYSLFKLENGRKRLLASARELQKGNEIVLPNHLGTLLYHAKNIHKVDEPKHLDYVDKHKDEFKELLDVVSNFSKKYTLAEGNLEKIKELYAQNNGEDLKELASSFINLLTFTAIGAPATFKFFDKNIDRKRYTSTTEILNATLIHQSITGLYETRIDLSKLGGD

SEQ ID NO: 656 - protein, 1345 aa, Streptococcus mutans; identical to SEQ ID NO: 655

SEQ ID NO: 657 - protein, 1229 aa, Streptococcus mutans
MKKPYSIGLDIGTNSVGWAVVTDDYKVPAKKMKVLGNTDKSHIEKNLLGALLFDSGNTAEDRRLKRTARRRYTRRRNRILYLQEIFSEEMGKVDDSFFHRLEDSFLVTEDKRGERHPIFGNLEEEVKYHENFPTIYHLRQYLADNPEKVDLRLVYLALAHIIKFRGHFLIEGKFDTRNNDVQRLFQEFLAVYDNTFENSSLQEQNIQVEEILTDKISKSAKKDRVLKLFPNEKSNGRFAEFLKLIVGNQADFKKHFELEEKAPLQFSKDTYEEELEVLLAQIGDNYAELFLSAKKLYDSILLSGILTVTDVGTKAPLSASMIQRYNEHQMDLTQLKQFIRQKLSDKYNEVFSDVSKDGYAGYIDGKTNQEAFYKYLKGLLNKIEGSGYFLDKIEREDFLRKQRTFDNGSIPHQIHLQEMRAIIRRQAEFYPFLADNQDRIEKILTFRIPYYVGPLARGKSDFAWLSRKSADKITPWNFDEIVDKESSAEAFINRMTNYDLYLPNQKVLPKHSLLYEKFTVYNELTKVKYKTEQGKTAFFDANMKQEIFDGVFKVYRKVTKDKLMDFLEKEFDEFRIVDLTGLDKENKVFNASYGTYHDLCKILDKDFLDNSKNEKILEDIVLTLTLFEDREMIRKRLENYSDLLTKEQVKKLERRHYTGWGRLSAELIHGIRNKESRKTILDYLIDDGNSNRNFMQLINDDALSFKEEIAKAQVIGETDNLNQVVSDIAGSPAIKKGILQSLKIVDELVKIMGHQPENIVVEMARENQFTNQGRRNSQQRLKGLTDSIKEFGSQILKEHPVENSQLQNDRLFLYYLQNGRDMYTGEELDIDYLSQYDIDHIIPQAFIKDNSIDNRVLTSSKENRGKSDDVPSKDVVRKMKPYWSKLLSAKLITQRKFDNLTKAERGGLTDDDKAGFIKRQLVETRQITKHVARILDERFNTETDENNKKIRQVKIVTLKSNLVSNFRKEFELYKVREINDYHHAHDAYLNAVIGKALLGVYPQLEPEFVYGDYPHFHGHEENKATAKKFFYSNIMNFFKKDDVRTDKNGEIIWKKDEHISNIKKVLSYPQVNIVKKVEEQTIGQNGGLFDDNPKSPLEVIPSKLVPLKKALNPEKYGGYQKPTTAYPILLIVDTKQLIPISVMDKKRFEQNPVKFLKDKGYQQIEKNNFVKLPKYTLVDIGNGIKRLWASSKEVHKGNQLVVSKKSQDLLYHAHHLDNDYSNEYVKNHY

SEQ ID NO: 658 - protein, 1229 aa, Streptococcus mutans; identical to SEQ ID NO: 657

SEQ ID NO: 659 - protein, 1345 aa, Streptococcus mutans
MKKPYSIGLDIGTNSVGWAVVTDDYKVPAKKMKVLGNTDKSHIEKNLLGALLFDSGNTAEDRRLKRTARRRYTRRRNRILYLQEIFSEEMGKVDDSFFHRLEDSFLVTEDKRGERHPIFGNLEEEVKYHENFPTIYHLRQYLADNPEKVDLRLVYLALAHIIKFRGHFLIEGKFDTRNNDVQRLFQEFLAVYDNTFENSSLQEQNVQVEEILTDKISKSAKKDRVLKLFPNEKSNGRFAEFLKLIVGNQADFKKHFELEEKAPLQFSKDTYEEELEVLLAQIGDNYAELFLSAKKLYDSILLSGILTVTDVGTKAPLSASMIQRYNEHQMDLAQLKQFIRQKLSDKYNEVFSDVSKDGYAGYIDGKTNQEAFYKYLKGLLNKIEGSGYFLDKIEREDFLRKQRTFDNGSIPHQIHLQEMRAIIRRQAEFYPFLADNQDRIEKLLTFRIPYYVGPLARGKSDFAWLSRKSADKITPWNFDEIVDKESSAEAFINRMTNYDLYLPNQKVLPKHSLLYEKFTVYNELIKVKYKTEQGKTAFFDANMKQEIFDGVFKVYRKVTKDKLMDFLEKEFDEFRIVDLTGLDKENKVFNASYGTYHDLCKILDKDFLDNSKNEKILEDIVLTLTLFEDREMIRKRLENYSDLLTKEQVKKLERRHYTGWGRLSAELIHGIRNKESRKTILDYLIDDGNSNRNFMQLINDDALSFKEEIAKAQVIGETDNLNQVVSDIAGSPAIKKGILQSLKIVDELVKIMGHQPENIVVEMARENQFTNQGRRNSQQRLKGLTDSIKEFGSQILKEHPVENSQLQNDRLFLYYLQNGRDMYTGEELDIDYLSQYDIDHIIPQAFIKDNSIDNRVLTSSKENRGKSDDVPSKDVVRKMKSYWSKLLSAKLITQRKFDNLTKAERGGLTDDDKAGFIKRQLVETRQITKHVARILDERFNTETDENNKKIRQVKIVTLKSNLVSNFRKEFELYKVREINDYHHAHDAYLNAVIGKALLGVYPQLEPEFVYGDYPHFHGHKENKATAKKFFYSNIMNFFKKDDVRTDKNGEIIWKKDEHISNIKKVLSYPQVNIVKKVEEQTGGFSKESILPKGNSDKLIPRKTKKFYWDTKKYGGFDSPIVAYSILVIADIEKGKSKKLKTVKALVGVTIMEKMTFERDPVAFLERKGYRNVQEENIIKLPKYSLFKLENGRKRLLASARELQKGNEIVLPNHLGTLLYHAKNIHKVDEPKHLDYVDKHKDEFKELLDVVSNFSKKYTLAEGNLEKIKELYAQNNGEDLKELASSFINLLTFTAIGAPATFKFFDKNIDRKRYTSTTEILNATLIHQSITGLYETRIDLNKLGGD

SEQ ID NO: 660 - protein, 1350 aa, Streptococcus mutans
MKKPYSIGLDIGTNSVGWAVVTDDYKVPAKKMKVLGNTDKSHIEKNLLGALLFDSGNTAEDRRLKRTARRRYTRRRNRILYLQEIFSEEMGKVDDSFFHRLEDSFLVTEDKRGERHPIFGNLEEEVKYHENFPTIYHLRQYLADNPEKVDLRLVYLALAHIIKFRGHFLIEGKFDTRNNDVQRLFQEFLAVYDNTFENSSLQEQNVQVEEILTDKISKSAKKDRVLKLFPNEKSNGRFAEFLKLIVGNQADFKKHFELEEKAPLQFSKDTYEEELEVLLAQIGDNYAELFLSAKKLYDSILLSGILTVTDVSTKAPLSASMIQRYNEHQMDLTQLKQFIRQKLSDKYNEVFSDVSKDGYAGYIDGKTNQEAFYKYLKGLLNKIEGSGYFLDKIEREDFLRKQRTFDNGSIPHQIHLQEMRAIIRRQAEFYSFLADNQDRIEKILTFRIPYYVGPLARGKSDFAWLSRKSADKITPWNFDEIVDKESSAEAFINRMTNYDLYLPNQKVLPKHSLLYEKFTVYNELTKVKYKTEQGKTAFFDANMKQEIFDGVFKVYRKVTKDKLMDFLEKEFDEFRIVDLTGLDKENKAFNASYGTYHDLRKILDKDFLDNSKNEKILEDIVLTLTLFEDREMIRKRLENYSDLLTKEQVKKLERRHYTGWGRLSAELIHGIRNKESRKTILDYLIDDGNSNRNFMQLINDDALSFKEEIAKAQVIGETDNLNQVVSDIAGSPAIKKGILQSLKIVDELVKIMGHQPENIVVEMARENQFTNQGRRNSQQRLKGLTDSIKEFGSQILKEHPVENSQLQNDRLFLYYLQNGRDMYTGEELDIDYLSQYDIDHIIPQAFIKDNSIDNRVLTSSKENRGKSDDVPSEDVVNRMRPFWNKLLSSGLISQRKYNNLTKKELTLDDKAGFIKRQLVETRQITKHVARMLDERFNKEFDDNNKRIRKVKIVTLKSNLVSSFRKEFELYKVREINDYHHAHDAYLNAVVVKALLVKYSKLEPEFVYGEYPKYNSYRERKTATQKMFFYSNIMNMFKSKVKLADDQIVERPMIEVNDETGEIAWDKTKHITTVKKVLSYPQVNIVKKVEEQTIGQNGGLFDDNPKSPLEVIPSKLVPLKKALNPEKYGGYQKPTTAYPILLIVDTKQLIPISVMDKKRFEQNPVKFLKDKGYQQIEKNNFVKLPKYTLVDIGNGIKRLWASSKEVHKGNQLVVSKKSQDLLYHAHHLDNDYSNEYVKNHYQQFDILFNEITSFSKKCKLGKEHIQKIEEAYSKERDSASIEELADGFIKLLGFTQLGATSPFSFLGIKLNQKQYTGKKDYLLPCMEATLIHQSITGLYETRIDLSKLGGD

SEQ ID NO: 661 - protein, 1350 aa, Streptococcus mutans
MKKPYSIGLDIGTNSVGWAVVTDDYKVPAKKMKVLGNTDKSHIEKNLLGALLFDSGNTAEDRRLKRTARRRYTRRRNRILYLQEIFSEEMGKVDDSFFHRLEDSFLVTEDKRGERHPIFGNLEEEVKYHENFPTIYHLRQYLADNPEKVDLRLVYLALAHIIKFRGHFLIEGKFDTRNNDVQRLFQEFLAVYDNTFENSSLQEQNVQVEEILTDKISKSAKKDRVLKLFPNEKSNGRFAEFLKLIVGNQADFKKHFELEEKAPLQFSKDTYEEELEVLLAQIGDNYAELFLSAKKLYDSILLSGILTVTDVSTKAPLSASMIQRYNEHQMDLTQLKQFIRQKLSDKYNEVFSDVSKDGYAGYIDGKTNQEAFYKYLKGLLNKIEGSGYFLDKIEREDFLRKQRTFDNGSIPHQIHLQEMRAIIRRQAEFYPFLADNQDRIEKILTFRIPYYVGPLARGKSDFAWLSRKSADKITPWNFDEIVDKESSAEAFINRMTNYDLYLPNQKVLPKHSLLYEKFTVYNELTKVKYKTEQGKTAFFDANMKQEIFDGVFKVYRKVTKDKLMDFLEKEFDEFRIVDLTGLDKENKAFNASYGTYHDLRKILDKDFLDNSKNEKILEDIVLTLTLFEDREMIRKRLKNYSDLLTKEQLKKLERRHYTGWGRLSAELIHGIRNKESRKTILDYLIDDGNSNRNFMQLINDDALSFKEEIAKAQVIGETDNLNQVVSDIAGSPAIKKGILQSLKIVDELVKIMGHQPENIVVEMARENQFTNQGRQNSQQRLKGLTDSIKEFGSQILKEHPVENSQLQNDRLFLYYLQNGRDMYTGEELDIDYLSQYDIDHIIPQAFIKDNSIDNRVLTSSKENRGKSDDVPSEDVVNRMRPFWNKLLSSGLISQRKYNNLTKKELTLDDKAGFIKRQLVETRQITKHVARMLDERFNKEFDDNNKRICKVKIVTLKSNLVSSFRKEFELYKVREINDYHHAHDAYLNAVVVKALLVKYSKLEPEFVYGEYPKYNSYRERKTATQKMFFYSNIMNMFKSKVKLADDQIVERPMIEVNDETGEIAWDKTKHITTVKKVLSYPQVNIVKKVEEQTIGQNGGLFDDNPKSPLEVIPSKLVPLKKALNPEKYGGYQKPTTAYPILLIVDTKQLIPISVMDKKRFEQNPVKFLKDKGYQQIEKNNFVKLPKYTLVDIGNGIKRLWASSKEVHKGNQLVVSKKSQDLLYHAHHLDNDYSNEYVKNHYQQFDILFNEITSFSKKCKLGKEHIQKIEEAYSKERDSASIEELADGFIKLLGFTQLGATSPFSFLGIKLNQKQYTGKKDYLLPCMEATLIHQSITGLYETRIDLSKLGGD

SEQ ID NO: 662 - protein, 1345 aa, Streptococcus mutans; identical to SEQ ID NO: 659

SEQ ID NO: 663 - protein, 1350 aa, Streptococcus mutans; identical to SEQ ID NO: 660

SEQ ID NO: 664 - protein, 1350 aa, Streptococcus mutans; identical to SEQ ID NO: 661

SEQ ID NO: 665 - protein, 1345 aa, Streptococcus mutans
MKKPYSIGLDIGTNSVGWAVVTDDYKVPAKKMKVLGNTDKSHIKKNLLGALLFDSGNTAADRRLKRTARRRYTRRRNRILYLQEIFAEEMSKVDDSFFHRLEDSFLVTEDKRGERHPIFGNLEEEVKYHENFPTIYHLRQYLADNPEKVDLRLVYLALAHIIKFRGHFLIEGKFDTRNNDVQRLFQEFLAVYDNTFENSSLQEQNVQVEEILTDKISKSAKKDRVLKLFPNEKSNGRFAEFLKLIVGNQADFKKHFELEEKAPLQFSKDTYEEELEVLLTQIGDNYAELFLSAKKLYDSILLSGILTVTDVSTKAPLSASMIQRYNEHQMDLAQLKQFIRQKLSDKYNEVFSDVSKDGYAGYIDGKTNQEAFYKYLKGLLNKIEGSGYFLDKIEREDFLRKQRTFDNGSIPHQIHLQEMRAIIRRQAEFYPFLADNQDRIEKILTFRIPYYVGPLARGKSDFAWLSRKSADKITPWNFDEIVDKESSAEAFINRMTNYDLYLPNQKVLPKHSLLYEKFTVYNELTKVKYKTEQGKTAFFDANMKQEIFDGVFKVYRKVTKDKLMDFLEKEFDEFRIVDLTGLDKENKAFNASYGTYHDLRKILDKDFLDNSKNEKILEDIVLTLTLFEDREMIRKRLENYSDLLTKEQVKKLERRHYTGWGRLSAELIHGIRNKESRKTLLDYLIDDGNSNRNFMQLINDDALSFKEEIAKAQVIGETDNLNQVVSDIAGSPAIKKGILQSLKIVDELVKIMGHQPENIVVEMARENQFTNQGRRNSQQRLKGLTDSIKEFGSQILKEHPVENSQLQNDRLFLYYLQNGRDMYTGEELDIDYLSQYDIDHIIPQAFIKDNSIDNRVLTSSKENRGKSDDVPSKDVVRKMKPYWSKLLSAKLITQRKFDNLTKAERGGLTDDDKAGFIKRQLVETRQITKHVARILDERFNTETDENNKKIRQVKIVTLKSNLVSNFRKEFELYKVREINDYHHAHDAYLNAVIGKALLGVYPQLEPEFVYGDYPHFHGHEENKATAKKFFYSNIMNFFKKDDVRTDKNGEIIWKKDEHISNIKKVLSYPQVNIVKKVEEQTGGFSKESILPKGNSDKLIPRKTKKFYWDTKKYGGFDSPIVAYSILVIADIEKGKSKKLKTVKALVGVTIMEKMTFERDPVAFLERKGYRNVQEENIIKLPKYSLFKLENGRKRLLASARELQKGNEIVLPNHLGTLLYHAKNIHKVDEPKHLDYVDKHKDEFKELLDVVSNFSKKYTLAEGNLEKIKELYAQNNGEDLKELSSSFINLLTFTAIGAPAAFKFFDKNIDRKRYTSTTEILNATLIHQSITGLYETRIDLSKLGGD

SEQ ID NO: 666 - protein, 1345 aa, Streptococcus mutans
MKKPYSIGLDIGTNSVGWAVVTDDYKVPAKKMKVLGNTDKSHIKKNLLGALLFDSGNTAADRRLKRTARRRYTRRRNRILYLQEIFAEEMSKVDDSFFHRLEDSFLVTEDKRGERHPIFGNLEEEVKYHENFPTIYHLRQYLADNPEKVDLRLVYLALAHIIKFRGHFLIEGKFDTRNNDVQRLFQEFLAVYDNTFENSSLQEQNVQVEEILTDKISKSAKKDRVLKLFPNEKSNGRFAEFLKLIVGNQADFKKHFELEEKAPLQFSKDTYEEELEVLLAQIGDNYAELFLSAKKLYDSILLSGILTVTDVSTKAPLSASMIQRYNEHQMDLAQLKQFIRQKLSDKYNEVFSDVSKDGYAGYIDGKTNQEAFYKYLKGLLNKIEGSGYFLDKIEREDFLRKQRTFDNGSIPHQIHLQEMRAIIRRQAEFYPFLADNQDRIEKILTFRIPYYVGPLARGKSDFAWLSRKSADKITPWNFDEIVDKESSAEAFINRMTNYDLYLPNQKVLPKHSLLYEKFTVYNELTKVKYKTEQGKTAFFDANMKQEIFDGVFKVYRKVTKDKLMDFLEKEFDEFRIVDLTGLDKENKAFNASYGTYHDLRKILDKDFLDNSKNEKILEDIVLTLTLFEDREMIRKRLENYSDLLTKEQVKKLERRHYTGWGRLSAELIHGIRNKESRKTILDYLIDDGNSNRNFMQLINDDALSFKEEIAKAQVIGETDNLNQVVSDIAGSPAIKKGILQSLKIVDELVKIMGHQPENIVVEMARENQFTNQGRRNSQQRLKGLTDSIKEFGSQILKEHPVEHSQLQNDRLFLYYLQNGRDMYTGEELDIDYLSQYDIDHIIPQAFIKDNSIDNRVLTSSKENRGKSDDVPSKNVVRKMKSYWSKLLSAKLITQRKFDNLTKAERGGLTDDDKAGFIKRQLVETRQITKHVARILDERFHTETDENNKKIRQVKIVTLKSNLVSNFRKEFELYKVREINDYHHAHDAYLNAVIGKALLGVYPQLEPEFVYGDYPHFHGHKENKATAKKFFYSNIMNFFKKDDVRTDKNGEIIWKKDEHISNIKKVLSYPQVNIVKKVEEQTGGFSKESILPKGNSDKLIPRKTKKFYWDTKKYGGFDSPIVAYSILVIADIEKGKSKKLKTVKALVGVTIMEKMTFERDPVAFLERKGYRNVQEENIIKLPKYSLFKLENGRKRLLASARELQKGNEIVLPNHLGTLLYHAKNIHKVDEPKHLDYVDKHKDEFKELLDVVSNFSKKYTLAEGNLEKIKELYAQNNGEDLKELASSFINLLTFTAIGAPATFKFFDKNIDRKRYTSTTEILNATLIHQSITGLYETRIDLSKLGGD

SEQ ID NO: 667 - protein, 1345 aa, Streptococcus mutans
MKKPYSIGLDIGTNSVGWAVVTDDYKVPAKKMKVLGNTDKSHIKKNLLGALLFDSGNTAADRRLKRTARRRYTRRRNRILYLQEIFAEEMSKVDDSFFHRLEDSFLVTEDKRGERHPIFGNLEEEVKYHENFPTIYHLRQYLADNPEKVDLRLVYLALAHIIKFRGHFLIEGKFDTRNNDVQRLFQEFLAVYDNTFENSSLQEQNVQVEEILTDKISKSAKKDRVLKLFPNEKSNGRFAEFLKLIVGNQADFKKHFELEEKAPLQFSKDTYEEELEVLLAQIGDNYAELFLSAKKLYDSILLSGILTVTDVSTKAPLSASMIQRYNEHQMDLAQLKQFIRQKLSDKYNEVFSDVSKDGYAGYIDGKTNQEAFYKYLKGLLNKIEGSGYFLDKIEREDFLRKQRTFDNGSIPHQIHLQEMRAIIRRQAEFYPFLADNQDRIEKILTFRIPYYVGPLARGKSDFAWLSRKSADKITPWNFDEIVDKESSAEAFINRMTNYDLYLPNQKVLPKHSLLYEKFTVYNELTKVKYKTEQGKTAFFDANMKQEIFDGVFKVYRKVTKDKLMDFLEKEFDEFRIVDLTGLDKENKVFNASYGTYHDLCKILDKDFLDNSKNEKILEDIVLTLTLFEDREMIRKRLENYSDLLTKEQVKKLERRHYTGWGRLSAELIHGIRNKESRKTILDYLIDDGNSNRNFMQLINDDALSFKEEIAKAQVIGETDNLNQVVSDIAGSPAIKKGILQSLKIVDELVKIMGHQPENIVVEMARENQFTKQGRRNSQQRLKGLTDSIKEFGSQILKEHPVENSQLQNDRLFLYYLQNGRDMYTGEELDIDYLSQYDIDHIIPQAFIKDNSIDNRVLTSSKENRGKSDDVPSKDVVRKMKSYWSKLLSAKLITQRKFDNLTKAERGGLTDDDKAGFIKRQLVETRQITKHVARILDERFYTETDENNKKIRQVKIVTLKSNLVSNFRKEFELYKVREINDYHHAHDAYLNAVIGKALLGVYPQLEPEFVYGDYPHFHGHKENKATAKKFFYSNIMNFFKKDDVRTDKNGEIIWKKDEHISNIKKVLSYPQVNIVKKVEEQTGGFSKESILPKGNSDKLIPRKTKKFYWDTKKYGGFDSPIVAYSILVIADIEKGKSKKLKTVKALVGVTIMEKMTFERDPVAFLERKGYRNVQEENIIKLPKYSLFKLENGRKRLLASARELQKGNEIVLPNHLGTLLYHAKNIHKVDEPKHLDYVDKHKDEFKELLDVVSNFSKKYTLAEGNLEKIKELYAQNNGEDLKELASSFINLLTFTAIGAPATFKFFDKNIDRKRYTSTTEILNATLIHQSITGLYETRIDLSKLGGD

SEQ ID NO: 668 - protein, 1345 aa, Streptococcus mutans
MKKPYSIGLDIGTNSVGWAVVTDDYKVPAKKMKVLGNTDKSHIKKNLLGALLFDSGNTAADRRLKRTARRRYTRRRNRILYLQEIFAEEMSKVDDSFFHRLEDSFLVTEDKRGERHPIFGNLEEEVKYHENFPTIYHLRQYLADNPEKVDLRLVYLALAHIIKFRGHFLIEGKFDTRNNDVQRLFQEFLAVYDNTFENSSLQEQNVQVEEILTDKISKSAKKDRVLKLFPNEKSNGRFAEFLKLIVGNQADFKKHFELEEKAPLQFSKDTYEEELEVLLAQIGDNYAELFLSAKKLYDSILLSGILTVTDVSTKAPLSASMIQRYNEHQMDLAQLKQFIRQKLSDKYNEVFSDVSKDGYAGYIDGKTNQEAFYKYLKGLLNKIEGSGYFLDKIEREDFLRKQRTFDNGSIPHQIHLQEMRAIIRRQAEFYPFLADNQDRIEKILTFRIPYYVGPLARGKSDFAWLSRKSADKITPWNFDEIVDKESSAEAFINRMTNYDLYLPNQKVLPKHSLLYEKFTVYNELTKVKYKTEQGKTAFFDANMKQEIFDGVFKVYRKVTKDKLMDFLEKEFDEFRIVDLTGLDKENKAFNASYGTYHDLRKILDKDFLDNSKNEKILEDIVLTLTLFEDREMIRKRLENYSDLLTKEQVKKLERRHYTGWGRLSAELIHGIRNKESRKTILDYLIDDGNSNRNFMQLINDDALSFKEEIAKAQVIGETDNLNQVVSDIAGSPAIKKGILQSLKIVDELVKIMGHQPENIVVEMARENQFTNQGRRNSQQRLKGLTDSIKEFGSQILKEHPVENSQLQNDRLFLYYLQNGRDMYTGEELDIDYLSQYDIDHIIPQAFIKDNSIDNRVLTSSKENRGKSDDVPSKNVVRKMKSYWSKLLSAKLITQRKFDNLTKAERGGLTDDDKAGFIKRQLVETRQITKHVARILDERFHTETDENNKKIRQVKIVTLKSNLVSNFRKEFELYKVREINDYHHAHDAYLNAVIGKALLGVYPQLEPEFVYGDYPHFHGHKENKATAKKFFYSNIMNFFKKDDVRTDKNGEIIWKKDEHISNIKKVLSYPQVNIVKKVEEQTGGFSKESILPKGNSDKLIPRKTKKFYWDTKKYGGFDSPIVAYSILVIADIEKGKSKKLKTVKALVGVTIMEKMTFERDPVAFLERKGYRNVQEENIIKLPKYSLFKLENGRKRLLASARELQKGNEIVLPNHLGTLLYHAKNIHKVDEPKHLDYVDKHKDEFKELLDVVSNFSKKYTLAEGNLEKIKELYAQNNGEDLKELSSSFINLLTFTAIGAPAAFKFFDKNIDRKRYTSTTEILNATLIHQSITGLYETRIDLSKLGGD

SEQ ID NO: 669 - protein, 1345 aa, Streptococcus mutans; identical to SEQ ID NO: 665

SEQ ID NO: 670 - protein, 1345 aa, Streptococcus mutans; identical to SEQ ID NO: 666

SEQ ID NO: 671 - protein, 1345 aa, Streptococcus mutans; identical to SEQ ID NO: 667

SEQ ID NO: 672 - protein, 1345 aa, Streptococcus mutans; identical to SEQ ID NO: 668

SEQ ID NO: 673 - protein, 1345 aa, Streptococcus mutans; identical to SEQ ID NO: 666

SEQ ID NO: 674 - protein, 1345 aa, Streptococcus mutans; identical to SEQ ID NO: 666

SEQ ID NO: 675 - protein, 1345 aa, Streptococcus mutans; identical to SEQ ID NO: 666

SEQ ID NO: 676 - protein, 1345 aa, Streptococcus mutans; identical to SEQ ID NO: 666

SEQ ID NO: 677 - protein, 1359 aa, Streptococcus mutans
MKKPYSIGLDIGTNSVGWAVVTDDYKVPAKKMKVLGNTDKSHIKKNLLGALLFDSGNTAEDRRLKRTARRRYTRRRNRILYLQEIFAEEMMQVDESFFQRLDDSFLVEEDKRGSRYPIFGTLKEEKKYHKEFKTIYHLREKLANSTEKADLRLVYLSLAHMIKFRGHFLIEGQLKAENTNVQALFKDFVEVYDKTVEESHLSEMTVDALSILTEKVSKSRRLENLVECYPTEKKNTLFGNLIALSLGLQPNFKTNFQLSEDAKLQFSKDTYEEDLEGLLGEIGDEYADLFASAKNLYDAILLSGILAVDDNTTKAPLSASMVKRYKEHKEELAAFKRFIKEKLPKKYEEIFKDDTKNGYAGYVGADKKLRKRSGKLATEEEFYKYVKGILNKVEGADVWLDKIDREDFLRKQRTFDNGSIPHQIHLQEMHAILRRQGEHYPFLKENQDKIEKILTFRIPYYVGPLVRKGSRFAWAEYKADEKITPWNFDDILDKEKSAEKFITRMTLNDLYLPEEKVLPKHSLLYETFTVYNELTKVKYVNEQGEAKFFDANMKQEIFDHVFKENRKVTKDKLLNYLNKEFEEFRIVNLTGLDKENKVFNSSLGTYHDLRKILNKSFLDNKENEQIIEDIIQTLTLFEDREMIRQRLQKYSDIFTKAQLKKLERRHYTGWGRLSYKLINGIRDKQSNKTILGYLIDDGYSNRNFMQLINDDALSFKEEIAKAQVIGEMDGLNQVVSDIAGSPAIKKGILQSLKIVDELVKVMGHNPANIVIEMARENQTTAKGRRSSQKRYKRLEEAIKNLDHDLNHKILKEHPTDNQALQNDRLFLYYLQNGRDMYTEDPLDINRLSDYDIDHIIPQAFIKDNSIDNRVLTRSDKNRGKSDDVPSEEVVHKMKPFWSKLLSAKLITQRKFDNLTKAERGGLTDDDKAGFIKRQLVETRQITKHVARILDERFNTETDENNKKIRQVKIVTLKSNLVSNFRKEFELYKVREINDYHHAHDAYLNAVIGKALLGVYPQLEPEFVYGDYPHFHGHKENKATAKKFFYSNIMNFFKKGDVRTDKNGEIIWKKDEHISNIKKVLSYPQVNIVKKVEEQTGGFSKESILPKGNSDKLIPRKTKKFYWDTKKYGGFDSPIVAYSILVIADIEKGKSKKLKTVKALVGVTIMEKMTFERDPVAFLERKGYRNVQEENIIKLPKYSLFKLENGRKRLLASARELQKGNEIVLPNHLETLLYHAKNIHKVDEPKHLDYVDKHKDEFKELLDVVSNFSKKYTLAEGNLEKIKELYAQNNGEDLKELASSFINLLTFTAIGAPAAFKFFDKNIDRKRYTSTTEILNATLIHQSITGLYETRIDLNKLGGD

SEQ ID NO: 678 - protein, 1359 aa, Streptococcus mutans; identical to SEQ ID NO: 677

SEQ ID NO: 679 - protein, 1355 aa, Streptococcus mutans
MKKPYSIGLDIGTNSVGWAVVTDDYKVPAKKMKVLGNTDKSHIKKNLLGALLFDSGNTAEDRRLKRTARRRYTRRRNRILYLQEIFAEEMSKVDDSFFHRLDESFLTDDDKNFDSHPIFGNKAEEDAYHQKFPTIYHLRKHLADSTEKADLRLVYLALAHMIKFRGHFLIEGELNAENTDVQKLFADFVGVYDRTFDDSHLSEITVDASSILTEKISKSRRLEKLINNYPKEKKNTLFGNLIALSLGLQPNFKTNFKLSEDAKLQFSKDTYEEDLEELLGKIGDDYADLFTLAKNLYDAILLSGILTADDSSTKAPLSASMIKRYAEHHEDLEKLKEFIKANKPELYHDIFKDETKNGYAGYIENGVKQDEFYKYLKNTLSKITGSDYFLDQIEREDFLRKQRTFDNGSIPHQIHLQEMHAILRRQGDYYPFLKENQDRIEKILTFRIPYYVGPLARKNSRFAWAEYHSDEAVTPWNFDQVIDKESSAQAFIEHMTNNDLYLPNEKVLPKHSPLYEKYTVYNELTKIKYVTEIGEAKFFDANLKQEIFDGLFKHERKVTKKKLRTFLDKNFDEFRIVDIQGLDKETETFNASYATYQDLLKVIKDKVFMDNPENAEILENIVLTLTLFEDREMIKQRLAKYADVFDKKVIDQLARRHYTGWGRLSAKLLNGIRDKQSCKTIMDYLIDDAQSNRNLMQLITDDNLTFKDDIVKAQYVDNSDDLHQVVQSLAGSPAIKKGILQSLKIVDELVKVMGKEPEQIVVEMARENQTTAKGRRNSQQRYKRLKEAIKSLDRDLNHKILKEHPTDNQALQNNRLFLYYLQNGRDMYTGESLDINRLSDYDIDHVIPQAFIKDNSIDNRVLTSSKANRGKSDDVPSEDVVNRMRPFWNKLLSSGLISQRKYNNLTKKELTLDDKAGFIKRQLVETRQITKHVARMLDERFNKEFDDNNKRIRRVKIVTLKSNLVSSFRKEFELYKVREINDYHHAHDAYLNAVVVKALLVKYPKLEPEFVYGEYPKYNSYRERKTATQKMFFYSNIMNMFKSKVKLADDQIVERPMIEVNDETGEIAWDKTKHITTVKKVLSYPQVNIVKKVEEQTIGQNGGLFDDNPKSPLEVIPSKLVPLKKALNPEKYGGYQKPTTAYPILLIVDTKQLIPISVMDKKRFEQNPVKFLKDKGYQQIEKNNFVKLPKYTLVDIGNGIKRLWASSKEVHKGNQLVVSKKSQDLLYHAHHLDNDYSNEYVKNHYQQFDILFNEITSFSKKCKLGKEHIQKIEEAYSKERDFASIEELADGFIKLLGFTQLGATSPFSFLGIKLNQKQYTGKKDYLLPCMEATLIHQSITGLYETRIDLSKLGGD

SEQ ID NO: 680 - protein, 1355 aa, Streptococcus mutans; identical to SEQ ID NO: 679

SEQ ID NO: 681 - protein, 1345 aa, Streptococcus mutans
MKKPYSIGLDIGTNSVGWAVVTDDYKVPAKKMKVLGNTDKSHIKKNLLGALLFDSGNTAEDRRLKRTARRRYTRRRNRILYLQEIFSEEMDKVDDSFFHRLEDSFLVTEDKRGERHPIFGNLEEEVKYHENFPTIYHLRQYLADNPEKVDLRLVYLALAHIIKFRGHFLIEGKFDTRNNDVQRLFQEFLAVYDNTFENSSLQEQNVQVEEILTDKISKSAKKDRVLKLFPNEKSNGRFAEFLKLIVGNQADFKKHFELEEKAPLQFSKDTYEEELEVLLAQIGDNYAELFLSAKKLYDSILLSGILTVTDVSTKAPLSASMIQRYNEHQMDLAQLKQFIRQKLSDKYNEVFSDVSKDGYAGYIDGKTNQEAFYKYLKGLLNKIEGSGYFLDKIEREDFLRKQRTFDNGSIPHQIHLQEMRAIIRRQAEFYPFLADNQDRIEKILTFRIPYYVGPLARGKSDFAWLSRKSADKITPWNFDEIVDKESSAEAFINRMTNYDLYLPNQKVLPKHSLLYEKFTVYNELTKVKYKTEQGKTAFFDANMKQEIFDGVFKVYRKVTKDKLMDFLEKEFDEFRIVDLTGLDKENKVFNASYGTYHDLCKILDKDFLDNSKNEKILEDIVLTLTLFEDREMIRKRLENYSDLLTKEQVKKLERRHYTGWGRLSAELIHGIRNKESRKTILDYLIDDGNSNRNFMQLINDDALSFKEEIAKAQVIGETDNLNQVVSDIAGSPAIKKGILQSLKIVDELVKIMGHQPENIVVEMARENQFTKQGRRNSQQRLKGLTDSIKEFGSQILKEHPVENSQLQNDRLFLYYLQNGRDMYTGEELDIDYLSQYDIDHIIPQAFIKDNSIDNRVLTSSKENRGKSDDVPSKDVVRKMKSYWSKLLSAKLITQRKFDNLTKAERGGLTDDDKAGFIKRQLVETRQITKHVARILDERFYTETDENNKKIRQVKIVTLKSNLVSNFRKEFELYKVREINDYHHAHDAYLNAVIGKALLGVYPQLEPEFVYGDYPHFHGHKENKATAKKFFYSNIMNFFKKDDVRTDKNGEIIWKKDEHISNIKKVLSYPQVNIVKKVEEQTGGFSKESILPKGNSDKLIPRKTKKFYWDTKKYGGFDSPIVAYSILVIADIEKGKSKKLKTVKALVGVTIMEKMTFERDPVAFLERKGYRNVQEENIIKLPKYSLFKLENGRKRLLASARELQKGNEIVLPNHLGTLLYHAKNIHKVDEPKHLDYVDKHKDEFKELLDVVSNFSKKYTLAEGNLEKIKELYAQNNGEDLKELASSFINLLTFTAIGAPATFKFFDKNIDRKRYTSTTEILNATLIHQSITGLYETRIDLSKLGGD

SEQ ID NO: 682 - protein, 1345 aa, Streptococcus mutans; identical to SEQ ID NO: 681

SEQ ID NO: 683 - protein, 1345 aa, Streptococcus mutans
MKKPYSIGLDIGTNSVGWAVVTDDYKVPAKKMKVLGNTDKSHIKKNLLGALLFDSGNTAEDRRLKRTARRRYTRRRNRILYLQEIFSEEMGKVDDSFFHRLDESFLTDDDKNFDSHPIFGNKAEEDAYHQKFPTIYHLRKHLADSTEKADLRLVYLALAHMIKFRGHFLIEGELNAENTDVQKLFADFVGVYDRTFDDSHLSEITVDASSILTEKISKSRRLEKLINNYPKEKKNTLFGNLIALSLGLQPNFKTNFKLSEDAKLQFSKDTYEEELEVLLAQIGDNYAELFLSAKKLYDSILLSGILTVTDVSTKAPLSASMIQRYNEHQMDLAQLKQFIRQKLSDKYNEVFSDVSKDGYAGYIDGKTNQEAFYKYLKGLLNKIEGSGYFLDKIEREDFLRKQRTFDNGSIPHQIHLQEMRAIIRRQAEFYPFLADNQDRIEKILTFRIPYYVGPLARGKSDFAWLSRKSADKITPWNFDEIVDKESSVEAFINRMTNYDLYLPNQKVLPKHSLLYEKFTVYNELTKVKYKTEQGKTAFFDANMKQEIFDGVFKVYRKVTKDKLMDFLEKEFDEFRIVDLTGLDKENKAFNASYGTYHDLRKILDKDFLDNSKNEKILEDIVLTLTLFEDREMIRKRLKNYSDLLTKEQLKKLERRHYTGWGRLSAELIHGIRNKESRKTILDYLIDDGNSNRNFMQLINDDALSFKEEIAKAQVIGETDNLNQVVSDIAGSPAIKKGILQSLKIVDELVKIMGHQPENIVVEMARENQFTNQGRRNSQQRLKGLTDSIKEFGSQILKEHPVENSQLQNDRLFLYYLQNGRDMYTGEELDIDYLSQYDIDHIIPQAFIKDNSIDNRVLTSSKENRGKSDDVPSKDVVRKMKSYWSKLLSAKLITQRKFDNLTKGERGGLTDDDKAGFIKRQLVETRQITKHVARILDERFNTETDENNKKIRQVKIVTLKSNLVSNFRKEFELYKVREINDYHHAHDAYLNAVIGKALLGVYPQLEPEFVYGDYPHFHGHKENKATAKKFFYSNIMNFFKKDDVRTDKNGEIIWKKDEYISNIKKVLSYPQVNIVKKVEEQTGGFSKESILPKGDSDKLIPRKTKKFYWDTKKYGGFDSPIVAYSILVIADIEKGKSKKLKTVKALVGVTIMEKMTFERDPVAFLERKGYRNVQEENIIKLPKYSLFKLENGRKRLLASARELQKGNEIVLPNHLGTLLYHAKNIHKVDEPKHLDYVDKHKDEFKELLDVVSNFSKKYTLAEGNLEKIKELYAQNNGEDLKELASSFINLLTFTAIGAPATFKFFDKNIDRKRYTSTTEILNATLIHQSITGLYETRIDLSKLGGD

SEQ ID NO: 684 - protein, 1345 aa, Streptococcus mutans
MKKPYSIGLDIGTNSVGWAVVTDDYKVPAKKMKVLGNTDKSHIKKNLLGALLFDSGNTAEDRRLKRTARRRYTRRRNRILYLQEIFSEEMGKVDDSFFHRLDESFLTDDDKNFDSYPIFGNKAEEDAYHQKFPTIYHLRKHLADSTEKADLRLVYLALAHMIKFRGHFLIEGELNAENTDVQKLFADFVGVYDRTFDDSHLSEITVDASSILTEKISKSRRLEKLINNYPKEKKNTLFRNLVALSLGLQPNFKTNFKLSEDAKLQFSKDTYEEDLEELLGKIGDDYADLFTLAKNLYDAILLSGILTADDSSTKAPLSASMIKRYAEHHEDLEKLKEFIKANKPELYHDIFKDETKNGYAGYIENGVKQDEFYKYLKNTLSKIAGSDYFLDKIEREDFLRKQRTFDNGSIPHQIHLQEMHAILRRQGDYYPFLKENQDRIEKILTFRIPYYVGPLARGKSDFAWLSRKSADKITPWNFDEIVDKESSVEAFINRMTNYDLYLPNQKVLPKHSLLYEKFTVYNELTKVKYKTEQGKTAFFDANMKQEIFDGVFKVYRKVTKDKLMDFLEKEFDEFRIVDLTGLDKENKAFNASYGTYHDLRKILDKDFLDNSKNEKILEDIVLTLTLFEDREMIRKRLKNYSDLLTKEQLKKLERRHYTGWGRLSAELIHGIRNKESRKTILDYLIDDGNSNRNFMQLINDDALSFKEEIAKAQVIGETDNLNQVVSDIAGSPAIKKGILQSLKIVDELVKIMGHQPENIVVEMARENQFTNQGRRNSQQRLKGLTDSIKEFGSQILKEHPVENSQLQNDRLFLYYLQNGRDMYTGEELDIDYLSQYDIDHIIPQAFIKDNSIDNRVLTSSKENRGKSDDVPSKDVVRKMKSYWSKLLSAKLITQRKFDNLTKGERGGLTDDDKAGFIKRQLVETRQITKHVARILDERFNTETDENNKKIRQVKIVTLKSNLVSNFRKEFELYKVREINDYHHAHDAYLNAVIGKALLGVYPQLEPEFVYGDYPHFHGHKENKATAKKFFYSNIMNFFKKDDVRTDKNGEIIWKKDEYISNIKKVLSYPQVNIVKKVEEQTGGFSKESILPKGDSDKLIPRKTKKFYWDTKKYGGFDSPIVAYSILVIADIEKGKSKKLKTVKALVGVTIMEKMTFERDPVAFLERKGYRNVQEENIIKLPKYSLFKLENGRKRLLASARELQKGNEIVLPNHLGTLLYHAKNIHKVDEPKHLDYVDKHKDEFKELLDVVSNFSKKYTLAEGNLEKIKELYAQNNGEDLKELASSFINLLTFTAIGAPATFKFFDKNIDRKRYTSTTEILNATLIHQSITGLYETRIDLSKLGGD

SEQ ID NO: 685 - protein, 1345 aa, Streptococcus mutans; identical to SEQ ID NO: 684

SEQ ID NO: 686 - protein, 1345 aa, Streptococcus mutans
MKKPYSIGLDIGTNSVGWAVVTDDYKVPAKKMKVLGNTDKSHIKKNLLGALLFDSGNTAEDRRLKRTARRRYTRRRNRILYLQEIFSEEMGKVDDSFFHRLEDSFLVTEDKRGERHPIFGNLEEEVKYHENFPTIYHLRQYLADNPEKTDLRLVYLALAHIIKFGGHFLIEGKFDTRNNDVQRLFQEFLAVYDNTFENSSLQEQNVQVEEILTDKISKSAKKDRVLKLFPNEKSNGRFAEFLKLIVGNQADFKKHFELEEKAPLQFSKDIYEEELEVLLAQIGDNYAELFLSAKKLYDSILLSGILTVTDVSTKAPLSASMIQRYNEHQMDLAQLKQFIRQKLSDKYNEVFSDVSKDGYAGYIDGKTNQEAFYKYLKGLLNKIEGSGYFLDKIEREDFLRKQRTFDNGSIPHQIHLQEMRAIIRRQAEFYPFLADNQDRIEKILTFRIPYYVGPLARGKSDFAWLSRKSADKITPWNFDEIVDKESSVEAFINRMTNYDLYLPNQKVLPKHSLLYEKFTVYNELTKVKYKTEQGKTAFFDANMKQEIFDGVFKVYRKVTKDKLMDFLEKEFDEFRIVDLTGLDKENKAFNASYGTYHDLRKILDKDFLDNSKNEKILEDIVLTLTLFEDREMIRKRLKNYSDLLTKEQLKKLERRHYTGWGRLSAELIHGIRNKESRKTILDYLIDDGNSNRNFMQLINDDALSFKEEIAKAQVIGETDNLNQVVSDIAGSPAIKKGILQSLKIVDELVKIMGHQPENIVVEMARENQFTNQGRRNSQQRLKGLTDSIKEFGSQILKEHPVENSQLQNDRLFLYYLQNGRDMYTGEELDIDYLSQYDIDHIIPQAFIKDNSIDNRVLTSSKENRGKSDDVPSKNVVRKMKSYWSKLLSAKLITQRKFDNLTKAERGGLTDDDKAGFIKRQLVETRQITKHVARILDERFHTETDENNKKIRQVKIVTLKSNLVSNFRKEFELYKVREINDYHHAHDAYLNAVIGKALLGVYPQLEPEFVYGDYPHFHGHKENKATAKKFFYSNIMNFFKKDDVRTDKNGEIIWKKDEHISNIKKVLSYPQVNIVKKVEEQTGGFSKESILPKGNSDKLIPRKTKKFYWDTKKYGGFDSPIVAYSILVIADIEKGKSKKLKTVKALVGVTIMEKMTFERDPVAFLERKGYRNVQEENIIKLPKYSLFKLENGRKRLLASARELQKGNEIVLPNHLGTLLYHAKNIHKVDEPKHLDYVDKHKDEFKELLDVVSNFSKKYTLAEGNLEKIKELYAQNNGEDLKELASSFINLLTFTAIGAPATFKFFDKNIDRKRYTSTTEILNATLIHQSITGLYETRIDLSKLGGD

SEQ ID NO: 687 - protein, 1345 aa, Streptococcus mutans; identical to SEQ ID NO: 686

SEQ ID NO: 688 - protein, 1345 aa, Streptococcus mutans
MKKPYSIGLDIGTNSVGWAVVTDDYKVPAKKMKVLGNTDKSHIKKNLLGALLFDSGNTAEDRRLKRTARRRYTRRRNRILYLQEIFSEEMGKVDDSFFHRLEDSFLVTEDKRGERHPIFGNLEEEVKYHENFPTIYHLRQYLADNPEKTDLRLVYLALAHIIKFRGHFLIEGKFDTRNNDVQRLFQEFLAVYDNTFENSSLQEQNVQVEEILTDKISKSAKKDRVLKLFPNEKSNGRFAEFLKLIVGNQADFKKHFELEEKAPLQFSKDIYEEELEVLLAQIGDNYAELFLSAKKLYDSILLSGILTVTDVSTKAPLSASMIQRYNEHQMDLAQLKQFIRQKLSDKYNEVFSDVSKDGYAGYIDGKTNQEAFYKYLKGLLNKIEGSGYFLDKIEREDFLRKQRTFDNGSIPHQIHLQEMRAIIRRQAEFYPFLADNQDRIEKILTFRIPYYVGPLARGKSDFAWLSRKSADKITPWNFDEIVDKESSVEAFINRMTNYDLYLPNQKVLPKHSLLYEKFTVYNELTKVKYKTEQGKTAFFDANMKQEIFDGVFKVYRKVTKDKLMDFLEKEFDEFRIVDLTGLDKENKAFNASYGTYHDLRKILDKDFLDNSKNEKILEDIVLTLTLFEDREMIRKRLKNYSDLLTKEQLKKLERRHYTGWGRLSAELIHGIRNKESRKTILDYLIDDGNSNRNFMQLINDDALSFKEEIAKAQVIGETDNLNQVVSDIAGSPAIKKGILQSLKIVDELVKIMGHQPENIVVEMARENQFTNQGRRNSQQRLKGLTDSIKEFGSQILKEHPVENSQLQNDRLFLYYLQNGRDMYTGEELDIDYLSQYDIDHIIPQAFIKDNSIDNRVLTSSKENRGKSDDVPSKNVVRKMKSYWSKLLSAKLITQRKFDNLTKAERGGLTDDDKAGFIKRQLVETRQITKHVARILDERFHTETDENNKKIRQVKIVTLKSNLVSNFRKEFELYKVREINDYHHAHDAYLNAVIGKALLGVYPQLEPEFVYGDYPHFHGHKENKATAKKFFYSNIMNFFKKDDVRTDKNGEIIWKKDEHISNIKKVLSYPQVNIVKKVEEQTGGFSKESILPKGNSDKLIPRKTKKFYWDTKKYGGFDSPIVAYSILVIADIEKGKSKKLKTVKALVGVTIMEKMTFERDPVAFLERKGYRNVQEENIIKLPKYSLFKLENGRKRLLASARELQKGNEIVLPNHLGTLLYHAKNIHKVDEPKHLDYVDKHKDEFKELLDVVSNFSKKYTLAEGNLEKIKELYAQNNGEDLKELASSFINLLTFTAIGAPATFKFFDKNIDRKRYTSTTEILNATLIHQSITGLYETRIDLSKLGGD

SEQ ID NO: 689 - protein, 1345 aa, Streptococcus mutans
MKKPYSIGLDIGTNSVGWAVVTDDYKVPAKKMKVLGNTDKSHIKKNLLGALLFDSGNTAEDRRLKRTARRRYTRRRNRILYLQEIFSEEMGKVDDSFFHRLEDSFLVTEDKRGERHPIFGNLEEEVKYHENFPTIYHLRQYLADNPEKTDLRLVYLALAHIIKFRGHFLIEGKFDTRNNDVQRLFQEFLAVYDNTFENSSLQEQNVQVEEILTDKISKSAKKDRVLKLFPNEKSNGRFAEFLKLIVGNQADFKKHFELEEKAPLQFSKDIYEEELEVLLAQIGDNYAELFLSAKKLYDSILLSGILTVTDVSTKAPLSASMIQRYNEHQMDLAQLKQFIRQKLSDKYNEVFSDVSKDGYAGYIDGKTNQEAFYKYLKGLLNKIEGSGYFLDKIEREDFLRKQRTFDNGSIPHQIHLQEMRAIIRRQAEFYPFLADNQDRIEKILTFRIPYYVGPLARGKSDFAWLSRKSADKITPWNFDEIVDKESSVEAFINRMTNYDLYLPNQKVLPKHSLLYEKFTVYNELTKVKYKTEQGKTAFFDANMKQEIFDGVFKVYRKVTKDKLMDFLEKEFDEFRIVDLTGLDKENKAFNASYGTYHDLRKILDKDFLDNSKNEKILEDIVLTLTLFEDREMIRKRLKNYSDLLTKEQLKKLERRHYTGWGRLSAELIHGIRNKESRKTILDYLIDDGNSNRNFMQLINDDALSFKEEIAKAQVIGETDNLNQVVSDIAGSPAIKKGILQSLKIVDELVKIMGHQPENIVVEMARENQFTNQGRRNSQQRLKGLTDSIKEFGSQILKEHPVENSQLQNDRLFLYYLQNGRDMYTGEELDIDYLSQYDIDHIIPQAFIKDNSIDNRVLTSSKENRGKSDDVPSKDVVRKMKSYWSKLLSAKLITQRKFDNLTKAERGGLTDDDKAGFIKRQLVETRQITKHVARILDERFNTETDENNKKIRQVKIVTLKSNLVSNFRKEFELYKVREINDYHHAHDAYLNAVIGKALLGVYPQLEPEFVYGDYPHFHGHKENKATAKKFFYSNIMNFFKKDDVRTDKNGEIIWKKDEHISNIKKVLSYPQVNIVKKVEEQTGGFSKESILPKGNSYKLIPRKTKKFYWDTKKYGGFDSPIVAYSILVIADIEKGKSKKLKTVKALVGVTIMEKMTFERDPVAFLERKGYRNVQEENIIKLPKYSLFKLENGRKRLLASARELQKGNEIVLPNHLGTLLYHAKNIHKVDEPKHLDYVDKHKDEFKELLDVVSNFSKKYTLAEGNLEKIKELYAQNNGEDLKELASSFINLLTFTAIGAPAAFKFFDKNIDRKRYTSTTEILNATLIHQSITGLYETRIDLSKLGGD

SEQ ID NO: 690 - protein, 1345 aa, Streptococcus mutans
MKKPYSIGLDIGTNSVGWAVVTDDYKVPAKKMKVLGNTDKSHIKKNLLGALLFDSGNTAEDRRLKRTARRRYTRRRNRILYLQEIFSEEMGKVDDSFFHRLEDSFLVTEDKRGERHPIFGNLEEEVKYHENFPTIYHLRQYLADNPEKTDLRLVYLALAHIIKFRGHFLIEGKFDTRNNDVQRLFQEFLAVYDNTFENSSLQEQNVQVEEILTDKISKSAKKDRVLKLFPNEKSNGRFAEFLKLIVGNQADFKKHFELEEKAPLQFSKDIYEEELEVLLAQIGDNYAELFLSAKKLYDSILLSGILTVTDVSTKAPLSASMIQRYNEHQMDLAQLKQFIRQKLSDKYNEVFSDVSKDGYAGYIDGKTNQEAFYKYLKGLLNKIEGSGYFLDKIEREDFLRKQRTFDNGSIPHQIHLQEMRAIIRRQAEFYPFLADNQDRIEKILTFRIPYYVGPLARGKSDFAWLSRKSADKITPWNFDEIVDKESSAEAFINRMTNYDLYLPNQKVLPKHSLLYEKFTVYNELTKVKYKTEQGKTAFFDANMKQEIFDGVFKVYRKVTKDKLMDFLEKEFDEFRIVDLTGLDKENKAFNASYGTYHDLRKILDKDFLDNSKNEKILEDIVLTLTLFEDREMIRKRLKNYSDLLTKEQLKKLERRHYTGWGRLSAELIHGIRNKESRKTILDYLIDDGNSNRNFMQLINDDALSFKEEIAKAQVIGETDNLNQVVSDIAGSLAIKKGILQSLKIVDELVKIMGHQPENIVVEMARENQFTNQGRRNSQQRLKGLTDSIKEFGSQILKEHPVENSQLQNDRLFLYYLQNGRDMYTGEELDIDYLSQYDIDHIIPQAFIKDNSIDNRVLTSSKENRGKSDDVPSKDVVRKMKSYWSKLLSAKLITQRKFDNLTKGERGGLTDDDKAGFIKRQLVETRQITKHVARILDERFNTETDENNKKIRQVKIVTLKSNLVSNFRKEFELYKVREINDYHHAHDAYLNAVIGKALLGVYPQLEPEFVYGDYPHFHGHKENKATAKKFFYSNIMNFFKKDDVRTDKNGEIIWKKDEYISNIKKVLSYPQVNIVKKVEEQTGGFFKESILPKGDSDKLIPRKTKKFYWDTKKYGGFDSPIVAYSILVIADIEKGKSKKLKTVKALVGVTIMEKMTFERDPVAFLERKGYRNVQEENIIKLPKYSLFKLENGRKRLLASARELQKGNEIVLPNHLGTLLYHAKNIHKVDEPKHLDYVDKHKDEFKELLDVVSNFSKKYTLAEGNLEKIKELYAQNNGEDLKELASSFINLLTFTAIGAPATFKFFDKNIDRKRYTSTTEILNATLIHQSITGLYETRIDLSKLGGD

SEQ ID NO: 691 - protein, 1345 aa, Streptococcus mutans
MKKPYSIGLDIGTNSVGWAVVTDDYKVPAKKMKVLGNTDKSHIKKNLLGALLFDSGNTAEDRRLKRTARRRYTRRRNRILYLQEIFSEEMGKVDDSFFHRLEDSFLVTEDKRGERHPIFGNLEEEVKYHENFPTIYHLRQYLADNPEKTDLRLVYLALAHIIKFRGHFLIEGKFDTRNNDVQRLFQEFLAVYDNTFENSSLQEQNVQVEEILTDKISKSAKKDRVLKLFPNEKSNGRFAEFLKLIVGNQADFKKHFELEEKAPLQFSKDIYEEELEVLLAQIGDNYAELFLSAKKLYDSILLSGILTVTDVSTKAPLSASMIQRYNEHQMDLAQLKQFIRQKLSDKYNEVFSDVSKDGYAGYIDGKTNQEAFYKYLKGLLNKIEGSGYFLDKIEREDFLRKQRTFDNGSIPHQIHLQEMRAIIRRQAEFYPFLADNQDRIEKILTFRIPYYVGPLARGKSDFAWLSRKSADKITPWNFDEIVDKESSVEAFINRMTNYDLYLPNQKVLPKHSLLYEKFTVYNELTKVKYKTEQGKTAFFDANMKQEIFDGVFKVYRKVTKDKLMDFLEKEFDEFRIVDLTGLDKENKAFNASYGTYHDLRKILDKDFLDNSKNEKILEDIVLTLTLFEDREMIRKRLKNYSDLLTKEQLKKLERRHYTGWGRLSAELIHGIRNKESRKTILDYLIDDGNSNRNFMQLINDDALSFKEEIAKAQVIGETDNLNQVVSDIAGSPAIKKGILQSLKIVDELVKIMGHQPENIVVEMARENQFTNQGRRNSQQRLKGLTDSIKEFGSQILKEHPVENSQLQNDRLFLYYLQNGRDMYTGEELDIDYLSQYDIDHIIPQAFIKDNSIDNRVLTSSKENRGKSDDVPSKDVVRKMKSYWSKLLSAKLITQRKFDNLTKAERGGLTDDDKAGFIKRQLVETRQITKHVARILDERFNTETDENNKKIRQVKIVTLKSNLVSNFRKEFELYKVREINDYHHAHDAYLNAVIGKALLGVYPQLEPEFVYGDYPHFHGHKENKATAKKFFYSNIMNFFKKDDVRTDKNGEIIWKKDEHISNIKKVLSYPQVNIVKKVEEQTGGFSKESILPKGNSDKLIPRKTKKFYWDTKKYGGFDSPIVAYSILVIADIEKGKSKKLKTVKALVGVTIMEKMTFERDPVAFLERKGYRNVQEENIIKLPKYSLFKLENGRKRLLASARELQKGNEIVLPNHLGTLLYHAKNIHKVDEPKHLDYVDKHKDEFKELLDVVSNFSKKYTLAEGNLEKIKELYAQNNGEDLKELASSFINLLTFTAIGAPATFKFFDKNIDRKRYTSTTEILNATLIHQSITGLYETRIDLNKLGGD

SEQ ID NO: 692 - protein, 1345 aa, Streptococcus mutans; identical to SEQ ID NO: 691

SEQ ID NO: 693 - protein, 1345 aa, Streptococcus mutans; identical to SEQ ID NO: 688

SEQ ID NO: 694 - protein, 1345 aa, Streptococcus mutans; identical to SEQ ID NO: 689

SEQ ID NO: 695 - protein, 1345 aa, Streptococcus mutans; identical to SEQ ID NO: 690

SEQ ID NO: 696 - protein, 1345 aa, Streptococcus mutans
MKKPYSIGLDIGTNSVGWAVVTDDYKVPAKKMKVLGNTDKSHIKKNLLGALLFDSGNTAEDRRLKRTARRRYTRRRNRILYLQEIFSEEMGKVDDSFFHRLEDSFLVTEDKRGERHPIFGNLEEEVKYHENFPTIYHLRQYLADNPEKVDLRLVYLALAHIIKFRGHFLIEGKFDTRNNDVQKLFQEFLAVYDNTFENSSLQEQNVQVEEILTDKISKSAKKDRVLKLFPNEKSNGRFAEFLKLIVGNQADFKKHFELEEKAPLQLSKDTYEEELEVLLAQIGDNYAELFLSAKKLYDSILLSGILTVTDVSTKAPLSASMIQRYNEHQMDLAQLKQFIRQKLSDKYNEVFSDVSKDGYAGYIDGKTNQEAFYKYLKGLLNKIEGSGYFLDKIEREDFLRKQRTFDNGSIPHQIHLQEMRAIIRRQAEFYPFLADNQDRIEKILTFRIPYYVGPLARGKSDFAWLSRKSADKITPWNFDEIVDKESSVEAFINRMTNYDLYLPNQKVLPKHSLLYEKFTVYNELTKVKYKTEQGKTAFFDANMKQEIFDGVFKVYRKVTKDKLMDFLEKEFDEFRIVDLTGLDKENKAFNASYGTYHDLRKILDKDFLDNSKNEKILEDIVLTLTLFEDREMIRKRLENYSDLLTKEQVKKLERRHYTGWGRLSAELIHGIRNKESRKTLLDYLIDDGNSNRNFMQLINDDALSFKEEIAKAQVIGETDNLNQVVSDIAGSPAIKKGILQSLKIVDELVKIMGHQPENIVVEMARENQFTNQGRRNSQQRLKGLTDSIKEFGSQILKEHPVENSQLQNDRLFLYYLQNGRDMYTGEELDIDYLSQYDIDHIIPQAFIKDNSIDNRVLTSSKENRGKSDDVPSKDVVRKMKSYWSKLLSAKLITQRKFDNLTKAERGGLTDDDKAGFIKRQLVETRQITKHVARILDERFNTETDENNKKIRQVKIVTLKSNLVSNFRKEFELYKVREINDYHHAHDAYLNAVIGKALLGVYPQLEPEFVYGDYPHFHGHKENKATAKKFFYSNIMNFFKKDDVRTDKNGEIIWKKDEYISNIKKVLSYPQVNIVKKVEEQTGGFSKESILPKGNSDKLIPRKTKKFYWDTKKYGGFDSPIVAYSILVIADIEKGKSKKLKTVKALVGVTIMEKMTFERDPIAFLERKGYRNVQEENIIKLPKYSLFKLENGRKRLLASARELQKGNEIVLPNHLGTLLYHAKNIHKVDEPKHLDYVDKHKDEFKELLDVVSNFSKKYTLAEGNLEKIKELYAQNNGEDLKELASSFINLLTFTAIGAPATFKFFDKNIDRKRYTSTTEILNATLIHQSITGLYETRIDLSKLGGD

SEQ ID NO: 697 - protein, 1345 aa, Streptococcus mutans; identical to SEQ ID NO: 696

SEQ ID NO: 698 - protein, 1345 aa, Streptococcus mutans
MKKPYSIGLDIGTNSVGWAVVTDDYKVPAKKMKVLGNTDKSHIKKNLLGALLFDSGNTAEDRRLKRTARRRYTRRRNRILYLQEIFSEEMGKVDDSFFHRLEDSFLVTEDKRGERHPIFGNLEEEVKYHENFPTIYHLRQYLADNPEKVDLRLVYLALAHIIKFRGHFLIEGKFDTRNNDVQRLFQEFLAVYDNTFENSSLQEQNVQVEEILTDKISKSAKKDRVLKLFPNEKSNGRFAEFLKLIVGNQADFKKHFELEEKAPLQFSKDTYEEDLEELLGKIGDDYADLFTLAKNLYDAILLSGILTADDSSTKAPLSASMIQRYNEHQMDLAQLKQFIRQKLSDKYNEVFSDVSKDGYAGYIDGKTNQEAFYKYLKGLLNKIEGSGYFLDKIEREDFLRKQRTFDNGSIPHQIHLQEMRAIIRRQAEFYPFLADNQDRIEKILTFRIPYYVGPLARGKSDFAWLSRKSADKITPWNFDEIVDKESSAEAFINRMTNYDLYLPNQKVLPKHSLLYEKFTVYNELTKVKYKTEQGKTAFFDANMKQEIFDGVFKVYRKVTKDKLMDFLEKEFDEFRIVDLTGLDKENKVFNASYGTYHDLCKILDKDFLDNSKNEKILEDIVLTLTLFEDREMIRKRLENYSDLLTKEQVKKLERRHYTGWGRLSAELIHGIRNKESRKTILDYLIDDGNSNRNFMQLINDDALSFKEEIAKAQVIGETDNLNQVVSDIAGSPAIKKGILQSLKIVDELVKIMGHQPENIVVEMARENQFTNQGRRNSQQRLKGLTDSIKEFGSQILKEHPVENSQLQNDRLFLYYLQNGRDMYTGEELDIDYLSQYDIDHIIPQAFIKDNSIDNRVLTSSKENRGKSDDVPSKDVVRKMKSYWSKLLSAKLITQRKFDNLTKAERGGLTDDDKAGFIKRQLVETRQITKHVARILDERFYTETDENNKKIRQVKIVTLKSNLVSNFRKEFELYKVREINDYHHAHDAYLNAVIGKALLGVYPQLEPEFVYGDYPHFHGHKENKATAKKFFYSNIMNFFKKDDVRTDKNGEIIWKKDEHISNIKKVLSYPQVNIVKKVEEQTGGFSKESILPKGNSDKLIPRKTKKFYWDTKKYGGFDSPIVAYSILVIADIEKGKSKKLKTVKALVGVTIMEKMTFERDPVAFLERKGYRNVQEENIIKLPKYSLFKLENGRKRLLASARELQKGNEIVLPNHLGTLLYHAKNIHKVDEPKHLDYVDKHKDEFKELLDVVSNFSKKYTLAEGNLEKIKELYAQNNGEDLKELASSFINLLTFTAIGAPATFKFFDKNIDRKRYTSTTEILNATLIHQSITGLYETRIDLSKLGGD

SEQ ID NO: 699 - protein, 1345 aa, Streptococcus mutans
MKKPYSIGLDIGTNSVGWAVVTDDYKVPAKKMKVLGNTDKSHIKKNLLGALLFDSGNTAEDRRLKRTARRRYTRRRNRILYLQEIFSEEMGKVDDSFFHRLEDSFLVTEDKRGERHPIFGNLEEEVKYHENFPTIYHLRQYLADNPEKVDLRLVYLALAHIIKFRGHFLIEGKFDTRNNDVQRLFQEFLAVYDNTFENSSLQEQNVQVEEILTDKISKSAKKDRVLKLFPNEKSNGRFAEFLKLIVGNQADFKKHFELEEKAPLQFSKDTYEEDLEELLGKIGDDYADLFTLAKNLYDAILLSGILTADDSSTKAPLSASMIQRYNEHQMDLAQLKQFIRQKLSDKYNEVFSDVSKDGYAGYIDGKTNQEAFYKYLKGLLNKIEGSGYFLDKIEREDFLRKQRTFDNGSIPHQIHLQEMRAIIRRQAEFYPFLADNQDRIEKILTFRIPYYVGPLARGKSDFAWLSRKSADKITPWNFDEIVDKESSAEAFINRMTNYDLYLPNQKVLPKHSLLYEKFTVYNELTKVKYKTEQGKTAFFDANMKQEIFDGVFKVYRKVTKDKLMDFLEKEFDEFRIVDLTGLDKENKVFNASYGTYHDLCKILDKDFLDNSKNEKILEDIVLTLTLFEDREMIRKRLENYSDLLTKEQVKKLERRHYTGWGRLSAELIHGIRNKESRKTILDYLIDDGNSNRNFMQLINDDALSFKEEIAKAQVIGETDNLNQVVSDIAGSPAIKKGILQSLKIVDELVKIMGHQPENIVVEMARENQFTNQGRRNSQQRLKGLTDSIKEFGSQILKEHPVENSQLQNDRLFLYYLQNGRDMYTGEELDIDYLSQYDIDHIIPQAFIKDNSIDNRVLTSSKENRGKSDDVPSKDVVRKMKPYWSKLLSAKLITQRKFDNLTKAERGGLTDDDKAGFIKRQLVETRQITKHVARILDERFNTETDENNKKIRQVKIVTLKSNLVSNFRKEFELYKVREINDYHHAHDAYLNAVIGKALLGVYPQLEPEFVYGDYPHFHGHEENKATAKKFFYSNIMNFFKKDDVRTDKNGEIIWKKDEHISNIKKVLSYPQVNIVKKVEEQTGGFSKESILPKGNSDKLIPRKTKKFYWDTKKYGGFDSPIVAYSILVIADIEKGKSKKLKTVKALVGVTIMEKMTFERDPVAFLERKGYRNVQEENIIKLPKYSLFKLENGRKRLLASARELQKGNEIVLPNHLGTLLYHAKNIHKVDEPKHLDYVDKHKDEFKELLDVVSNFSKKYTLAEGNLEKIKELYAQNNGEDLKELASSFINLLTFTAIGAPATFKFFDKNIDRKRYTSTTEILNATLIHQSITGLYETRIDLSKLGGD

SEQ ID NO: 700 - protein, 1345 aa, Streptococcus mutans
MKKPYSIGLDIGTNSVGWAVVTDDYKVPAKKMKVLGNTDKSHIKKNLLGALLFDSGNTAEDRRLKRTARRRYTRRRNRILYLQEIFSEEMGKVDDSFFHRLEDSFLVTEDKRGERHPIFGNLEEEVKYHENFPTIYHLRQYLADNPEKVDLRLVYLALAHIIKFRGHFLIEGKFDTRNNDVQRLFQEFLAVYDNTFENSSLQEQNVQVEEILTDKISKSAKKDRVLKLFPNEKSNGRFAEFLKLIVGNQADFKKHFELEEKAPLQFSKDTYEEELEVLLAQIGDNYAELFLSAKKLYDSILLSGILTVTDVSTKAPLSASMIQRYNEHQMDLAQLKQFIRQKLSDKYNEVFSDVSKDGYAGYIDGKTNQEAFYKYLKGLLNKIEGSGYFLDKIEREDFLRKQRTFDNGSIPHQIHLQEMRAIIRRQAEFYPFLADNQDRIEKILTFRIPYYVGPLARGKSDFAWLSRKSADKITPWNFDEIVDKESSAEAFINRMTNYDLYLPNQKVLPKHSLLYEKFTVYNELTKVKYKTEQGKTAFFDANMKQEIFDGVFKVYRKVTKDKLMDFLEKEFDEFRIVDLTGLDKENKVFNASYGTYHDLCKILDKDFLDNSKNEKILEDIVLTLTLFEDREMIRKRLENYSDLLTKEQVKKLERRHYTGWGRLSAELIHGIRNKESRKTILDYLIDDGNSNRNFMQLINDDALSFKEEIAKAQVIGETDNLNQVVSDIAGSPAIKKGILQSLKIVDELVKIMGHQPENIVVEMARENQFTKQGRRNSQQRLKGLTDSIKEFGSQILKEHPVENSQLQNDRLFLYYLQNGRDMYTGEELDIDYLSQYDIDHIIPQAFIKDNSIDNRVLTSSKENRGKSDDVPSKDVVRKMKSYWSKLLSAKLITQRKFDNLTKAERGGLTDDDKAGFIKRQLVETRQITKHVARILDERFYTETDENNKKIRQVKIVTLKSNLVSNFRKEFELYKVREINDYHHAHDAYLNAVIGKALLGVYPQLEPEFVYGDYPHFHGHKENKATAKKFFYSNIMNFFKKDDVRTDKNGEIIWKKDEHISNIKKVLSYPQVNIVKKVEEQTGGFSKESILPKGNSDKLIPRKTKKFYWDTKKYGGFDSPIVAYSILVIADIEKGKSKKLKTVKALVGVTIMEKMTFERDPVAFLERKGYRNVQEENIIKLPKYSLFKLENGRKRLLASARELQKGNEIVLPNHLGTLLYHAKNIHKVDEPKHLDYVDKHKDEFKELLDVVSNFSKKYTLAEGNLEKIKELYAQNNGEDLKELASSFINLLTFTAIGAPATFKFFDKNIDRKRYTSTTEILNATLIHQSITGLYETRIDLSKLGGD

SEQ ID NO: 701 - protein, 1345 aa, Streptococcus mutans
MKKPYSIGLDIGTNSVGWAVVTDDYKVPAKKMKVLGNTDKSHIKKNLLGALLFDSGNTAEDRRLKRTARRRYTRRRNRILYLQEIFSEEMGKVDDSFFHRLEDSFLVTEDKRGERHPIFGNLEEEVKYHENFPTIYHLRQYLADNPEKVDLRLVYLALAHIIKFRGHFLIEGKFDTRNNDVQRLFQEFLAVYDNTFENSSLQEQNVQVEEILTDKISKSAKKDRVLKLFPNEKSNGRFAEFLKLIVGNQADFKKHFELEEKAPLQFSKDTYEEELEVLLAQIGDNYAELFLSAKKLYDSILLSGILTVTDVSTKAPLSASMIQRYNEHQMDLAQLKQFIRQKLSDKYNEVFSDVSKDGYAGYIDGKTNQEAFYKYLKGLLNKIEGSGYFLDKIEREDFLRKQRTFDNGSIPHQIHLQEMRAIIRRQAEFYPFLADNQDRIEKILTFRIPYYVGPLARGKSDFAWLSRKSADKITPWNFDEIVDKESSAEAFINRMTNYDLYLPNQKVLPKHSLLYEKFTVYNELTKVKYKTEQGKTAFFDANMKQEIFDGVFKVYRKVTKDKLMDFLEKEFDEFRIVDLTGLDKENKVFNASYGTYHDLCKILDKDFLDNSKNEKILEDIVLTLTLFEDREMIRKRLENYSDLLTKEQVKKLERRHYTGWGRLSAELIHGIRNKESRKTILDYLIDDGNSNRNFMQLINDDALSFKEEIAKAQVIGETDNLNQVVSDIAGSPAIKKGILQSLKIVDELVKIMGHQPENIVVEMARENQFTKQGRRNSQQRLKGLTDSIKEFGSQILKEHPVENSQLQNDRLFLYYLQNGRDMYTGEELDIDYLSQYDIDHIIPQAFIKDNSIDNRVLTSSKENRGKSDDVPSKDVVRKMKSYWSKLLSAKLITQRKFDNLTKAERGGLTDDDKAGFIKRQLVETRQITKHVARILDERFYTETDENNKKIRQVKIVTLKSNLVSNFRKEFELYKVREINDYHHAHDAYLNAVIGKALLGVYPQLEPEFVYGDYPHFHGHKENKATAKKFFYSNIMNFFKKDDVRTDRNGEIIWKKDEHISNIKKVLSYPQVNIVKKVEEQTGGFSKESILPKGNSDKLIPRKTKKFYWDTKKYGGFDSPIVAYSILVIADIEKGKSKKLKTVKALVGVTIMEKMTFERDPVAFLERKGYRNVQEENIIKLPKYSLFKLENGRKRLLASARELQKGNEIVLPNHLGTLLYHAKNIHKVDEPKHLDYVDKHKDEFKELLDVVSNFSKKYTLAEGNLEKIKELYAQNNGEDLKELASSFINLLTFTAIGAPATFKFFDKNIDRKRYTSTTEILNATLIHQSITGLYETRIDLSKLGGD

SEQ ID NO: 702 - protein, 1345 aa, Streptococcus mutans
MKKPYSIGLDIGTNSVGWAVVTDDYKVPAKKMKVLGNTDKSHIKKNLLGALLFDSGNTAEDRRLKRTARRRYTRRRNRILYLQEIFSEEMGKVDDSFFHRLEDSFLVTEDKRGERHPIFGNLEEEVKYHENFPTIYHLRQYLADNPEKVDLRLVYLALAHIIKFRGHFLIEGKFDTRNNDVQRLFQEFLAVYDNTFENSSLQEQNVQVEEILTDKISKSAKKDRVLKLFPNEKSNGRFAEFLKLIVGNQADFKKHFELEEKAPLQFSKDTYEEELEVLLAQIGDNYAELFLSAKKLYDSILLSGILTVTDVSTKAPLSASMIQRYNEHQMDLAQLKQFIRQKLSDKYNEVFSDVSKDGYAGYIDGKTNQEAFYKYLKGLLNKIEGSGYFLDKIEREDFLRKQRTFDNGSIPHQIHLQEMRAIIRRQAEFYPFLADNQDRIEKILTFRIPYYVGPLARGKSDFAWLSRKSADKITPWNFDEIVDKESSAEAFINRMTNYDLYLPNQKVLPKHSLLYEKFTVYNELTKVKYKTEQGKTAFFDANMKQEIFDGVFKVYRKVTKDKLMDFLEKEFDEFRIVDLTGLDKENKVFNASYGTYHDLCKILDKDFLDNSKNEKILEDIVLTLTLFEDREMIRKRLENYSDLLTKEQVKKLERRHYTGWGRLSAELIHGIRNKESRKTILDYLIDDGNSNRNFMQLINDDALSFKEEIAKAQVIGETDNLNQVVSDIAGSPAIKKGILQSLKIVDELVKIMGHQPENIVVEMARENQFTNQGRQNSQQRLKGLTDSIKEFGSQILKEHPVENSQLQNDRLFLYYLQNGRDMYTGEELDIDYLSQYDIDHIIPQAFIKDNSIDNRVLTSSKENRGKSDDVPSEDVVRKMKSYWSKLLSAKLITQRKFDNLTKAERGGLTDDDKAGFIKRQLVETRQITKHVARILDERFYTETDENNKKIRQVKIVTLKSNLVSNFRKEFELYKVREINDYHHAHDAYLNAVIGKALLGVYPQLEPEFVYGDYPHFHGHKENKATAKKFFYSNIMNFFKKDDVRTDKNGEIIWKKDEHISNIKKVLSYPQVNIVKKVEEQTGGFSKESILPKGNSDKLIPRKTKKFYWDTKKYGGFDSPIVAYSILVIADIEKGKSKKLKTVKALVGVTIMEKMTFERDPVAFLERKGYRNVQEENIIKLPKYSLFKLENGRKRLLASARELQKGNEIVLPNHLGTLLYHAKNIHKVDEPKHLDYVDKHKDEFKELLDVVSNFSKKYTLAEGNLEKIKELYAQNNGEDLKELASSFINLLTFTAIGAPATFKFFDKNIDRKRYTSTTEILNATLIHQSITGLYETRIDLSKLGGD

SEQ ID NO: 703 - protein, 1345 aa, Streptococcus mutans; identical to SEQ ID NO: 702

SEQ ID NO: 704 - protein, 1345 aa, Streptococcus mutans; identical to SEQ ID NO: 698

SEQ ID NO: 705 - protein, 1345 aa, Streptococcus mutans; identical to SEQ ID NO: 699

SEQ ID NO: 706 - protein, 1345 aa, Streptococcus mutans; identical to SEQ ID NO: 700

SEQ ID NO: 707 - protein, 1345 aa, Streptococcus mutans; identical to SEQ ID NO: 701

SEQ ID NO: 708 - protein, 1345 aa, Streptococcus mutans; identical to SEQ ID NO: 700

SEQ ID NO: 709 - protein, 1345 aa, Streptococcus mutans; identical to SEQ ID NO: 700

SEQ ID NO: 710 - protein, 1345 aa, Streptococcus mutans; identical to SEQ ID NO: 700

SEQ ID NO: 711 - protein, 1345 aa, Streptococcus mutans; identical to SEQ ID NO: 701

SEQ ID NO: 712 - protein, 1345 aa, Streptococcus mutans
MKKPYSIGLDIGTNSVGWAVVTDDYKVPAKKMKVLGNTDKSHIKKNLLGALLFDSGNTAEDRRLKRTARRRYTRRRNRILYLQEIFSEEMGKVNDSFFHRLEDSFLVTEDKRGERHPIFGNLEEEVKYHENFPTIYHLRQYLADNPEKVDLRLVYLALAHIIKFRGHFLIEGKFDTRNNDVQRLFQEFLAVYDNTFENSSLQEQNVQVEEILTDKISKSAKKDRVLKLFPNEKSNGRFAEFLKLIVGNQADFKKHFELEEKAPLQFSKDTYEEELEVLLAQIGDNYAELFLSAKKLYDSILLSGILTVTDVSTKAPLSASMIQRYNEHQMDLAQLKQFIRQKLSDKYNEVFSDVSKDGYAGYIDGKTNQEAFYKYLKGLLNKIEGSGYFLDKIEREDFLRKQRTFDNGSIPHQIHLQEMRAIIRRQAEFYPFLADNQDRIEKILTFRIPYYVGPLARGKSDFAWLSRKSADKITPWNFDEIVDKESSAEAFINRMTNYDLYLPNQKVLPKHSLLYEKFTVYNELTKVKYKTEQGKTAFFDANMKQEIFDGVFKVYRKVTKDKLMDFLEKEFDEFRIVDLTGLDKENKVFNASYGTYHDLCKILDKDFLDNSKNEKILEDIVLTLTLFEDREMIRKRLENYSDLLTKEQVKKLERRHYTGWGRLSAELIHGIRNKESRKTILDYLIDDGNSNRNFMQLINDDALSFKEEIAKAQVIGETDNLNQVVSDIAGSPAIKKGILQSLKIVDELVKIMGHQPENIVVEMARENQFTKQGRRNSQQRLKGLTDSIKEFGSQILKEHPVENSQLQNDRLFLYYLQNGRDMYTGEELDIDYLSQYDIDHIIPQAFIKDNSIDNRVLTSSKENRGKSDDVPSKDVVRKMKSYWSKLLSAKLITQRKFDNLTKAERGGLTDDDKAGFIKRQLVETRQITKHVARILDERFYTETDENNKKIRQVKIVTLKSNLVSNFRKEFELYKVREINDYHHAHDAYLNAVIGKALLGVYPQLEPEFVYGDYPHFHGHKENKATAKKFFYSNIMNFFKKDDVRTDKNGEIIWKKDEYISNIKKVLSYPQVNIVKKVEEQTGGFSKESILPKGNSDKLIPRKTKKFYWDTKKYGGFDSPIVAYSILVIADIEKGKSKKLKTVKALVGVTIMEKMTFERDPIAFLERKGYRNVQEENIIKLPKYSLFKLENGRKRLLASARELQKGNEIVLPNHLGTLLYHAKNIHKVDEPKHLDYVDKHKDEFKELLDVVSNFSKKYTLAEGNLEKIKELYAQNNGEDLKELASSFINLLTFTAIGAPAAFKFFDKNIDRKRYTSTTEILNATLIHQSITGLYETRIDLSKLGGD

SEQ ID NO: 713 - protein, 1345 aa, Streptococcus mutans; identical to SEQ ID NO: 712

SEQ ID NO: 714 - protein, 1345 aa, Streptococcus mutans
MKKPYSIGLDIGTNSVGWAVVTDDYKVPAKKMKVLGNTDKSHIKKNLLGALLFDSGNTAEDRRLKRTTRRRYTRRRNRILYLQEIFSEEMGKVDDSFFHRLEDSFLVTEDKRGERHPIFGNLEEEVKYHENFPTIYHLRQYLADNPEKTDLRLVYLALAHIIKFRGHFLIEGKFDTRNNDVQRLFQEFLAVYDNTFENSSLQEQNVQVEEILTDKISKSAKKDRVLKLFPNEKSNGCFAEFLKLIVGNQADFKKHFELEEKAPLQFSKDTYEEELEVLLAQIGDNYAELFLSAKKLYDSILLSGILTVTDVSTKAPLSASMIQRYNEHQMDLTQLKQFIRQKLSDKYNEVFSDVSKDGYAGYIDGKTNQEAFYKYLKGLLNKIEGSGYFLDKIEREDFLRKQRTFDNGSIPHQIHLQEMRAIIRRQAEFYPFLADNQDRIEKLLTFRIPYYVGPLASGKSDFAWLSRKSADKITPWNFDEIVDKESSAEAFINRMTNYDLYLPNQKVLPKHSLLYEKFTVYNELTKVKYKTEQGKTAFFDANMKQEIFDGVFKVYRKVTKDKLMDFLEKEFDEFRIVDLTGLDKENKVFNASYGTYHDLCKILDKDFLDNSKNEKILEDIVLTLTLFEDREMIRKRLENYSDLLTKEQVKKLERRHYTGWGRLSAELIHGIRNKESRKTILDYLIDDGNSNRNFMQLINDDALSFKEEIAKAQVIGETDNLNQVVSDIAGSPAIKKGILQSLKIVDELVKIMGHQPENIVVEMARENQFTNQGRRNSQQRLKGLTDSIKEFGSQILKEHPVENSQLQNDRLFLYYLQNGRDMYTGEELDIDYLSQYDIDHIIPQAFIKDNSIDNRVLTSSKENRGKSDDVPSKDVVRKMKSYWSKLLSAKLITQRKFDNLTKAERGGLTDDDKAGFIKRQLVETRQITKHVARILDERFNTETDENNKKIRQVKIVTLKSNLVSNFRKEFELYKVREINDYHHAHDAYLNAVIGKALLGVYPQLEPEFVYGDYPHFHGHKENKATAKKFFYSNIMNFFKKDDVRTDKNGEIIWKKDEHISNIKKVLSYPQVNIVKKVEEQTGGFSKESILPKGNSDKLIPRKTKKFYWDTKKYGGFDSPIVAYSILVIADIEKGKSKKLKTVKALVGVTIMEKMTFERDPVAFLERKGYRNVQEENIIKLPKYSLFKLENGRKRLLASARELQKGNEIVLPNHLGTLLYHAKNIHKVDEPKHLDYVDKHKDEFKELLDVVSNFSKKYTLAEGNLEKIKELYAQNNGEDLKELASSFINLLTFTAIGAPATFKFFDKNIDRKRYTSTTEILNATLIHQSITGLYETRIDLSKLGGD

SEQ ID NO: 715 - protein, 1345 aa, Streptococcus mutans; identical to SEQ ID NO: 714

SEQ ID NO: 716 - protein, 1350 aa, Streptococcus mutans
MKKPYSIGLDIGTNSVGWAVVTDDYKVPAKKMTVLGNTDKSHIKKNLLGALLFDSGNTAADRRLKRTARRRYTRRRNRILYLQEIFAEEMSKVDDSFFHRLEDSFLVTEDKRGERHPIFGNLEEEVKYHENFPTIYHLRQYLADNPEKVDLRLVYLALAHIIKFRGHFLIEGKFDTRNNDVQRLFQEFLAVYDNTFENSSLQEQNVQVEEILTDKISKSAKKDRVLKLFPNEKSNGRFAEFLKLIVGNQADFKKHFELEEKTPLQFSKDTYEEELEVLLAQIGDNYAELFLSAKKLYDSILLSGILTVTDVSTKAPLSASMIQRYNEHQMDLAQLKQFIRQKLSDKYNEVFSDVSKDGYAGYIDGKTNQEAFYKYLKGLLNKIEGSGYFLDKIEREDFLRKQRTFDNGSIPHQIHLQEMRAIIRRQAEFYPFLADNQDRIEKILTFRIPYYVGPLARGKSDFAWLSRKSADKITPWNFDEIVDKESSAEAFINRMTNYDLYLPNQKVLPKHSLLYEKFTVYNELTKVKYKTEQGKTAFFDANMKQEIFDGVFKVYRKVTKDKLMDFLEKEFDEFRIVDLTGLDKENKAFNASYGTYHDLRKILDKDFLDNSKNEKILEDIVLTLTLFEDREMIRKRLENYSDLLTKEQVKKLERRHYTGWGRLSAELIHGIRNKESRKTILDYLIDDGNSNRNFMQLINDDALSFKEEIAKAQVIGETDNLNQVVSDIAGSPAIKKGILQSLKIVDELVKIMGHQPENIVVEMARENQFTNQGRRNSQQRLKGLTDSIKEFGSQILKEHPVENSQLQNDRLFLYYLQNGRDMYTGEELDIDYLSQYDIDHIIPQAFIKDNSIDNRVLTSSKENRGKSDDVPSEDVVNRMRPFWNKLLSSGLISQRKYNNLTKKELTPDDKAGFIKRQLVETRQITKHVARMLDERFNKEFDDNNKRIRRVKIVTLKSNLVSSFRKEFELYKVREINDYHHAHDAYLNAVVVKALLVKYPKLEPEFVYGEYPKYNSYRERKTATQKMFFYSNIMNMFKSKVKLADDQIVERPMIEVNDETGEIAWDKTKHITTVKKVLSYPQVNIVKKVEEQTIGQNGGLFDDNPKSPLEVIPSKLVPLKKALNPEKYGGYQKPTTAYPILLIVDTKQLIPISVMDKKRFEQNPVKFLKDKGYQQIEKNNFVKLPKYTLVDIGNGIKRLWASSKEVHKGNQLVVSKKSQDLLYHAHHLDNDYSNEYVKNHYQQFDILFNEITSFSKKCKLGKEHIQKIEEAYSKERDSASIEELADGFIKLLGFTQLGATSPFSFLGIKLNQKQYTGKKDYLLPCMEATLIHQSITGLYETRIDLSKLGGD

SEQ ID NO: 717 - protein, 1350 aa, Streptococcus mutans; identical to SEQ ID NO: 716

SEQ ID NO: 718 - protein, 1345 aa, Streptococcus mutans
MKKPYSIGLDIGTNSVGWAVVTDDYKVPDKKMKVLGNTDKSHIKKNLLGALLFDSGNTAEDRRLKRTARRRYTRRRNRILYLQEIFSEEMGKVDDSFFHRLEDSFLVTEDKRGERHPIFGNLEEEVKYHENFPTIYHLRQYLADNPEKTDLRLVYLALAHIIKFRGHFLIEGKFDTRNNDVQRLFQEFLAVYDNTFENSSLQEQNVQVEEILTDKISKSAKKDRVLKLFPNEKSNGRFAEFLKLIVGNQADFKKHFELEEKAPLQFSKDIYEEELEVLLAQIGDNYAELFLSAKKLYDSILLSGILTVTDVSTKAPLSASMIQRYNEHQMDLAQLKQFIRQKLSDKYNEVFSDVSKDGYAGYIDGKTNQEAFYKYLKGLLNKIEGSGYFLDKIEREDFLRKQRTFDNGSIPHQIHLQEMRAIIRRQAEFYPFLADNQDRIEKILTFRIPYYVGPLARGKSDFAWLSRKSADKITPWNFDEIVDKESSVEAFINRMTNYDLYLPNQKVLPKHSLLYEKFTVYNELTKVKYKTEQGKTAFFDANMKQEIFDGVFKVYRKVTKDKLMDFLEKEFDEFRIVDLTGLDKENKAFNASYGTYHDLRKILDKDFLDNSKNEKILEDIVLTLTLFEDREMIRKRLKNYSDLLTKEQLKKLERRHYTGWGRLSAELIHGIRNKESRKTILDYLIDDGNSNRNFMQLINDDALSFKEEIAKAQVIGETDNLNQVVSDIAGSPAIKKGILQSLKIVDELVKIMGHQPENIVVEMARENQFTNQGRRNSQQRLKGLTDSIKEFGSQILKEHPVENSQLQNDRLFLYYLQNGRDMYTGEELDIDYLSQYDIDHIIPQAFIKDNSIDNRVLTSSKENRGKSDDVPSKDVVRKMKSYWSKLLSAKLITQRKFDNLTKAERGGLTDDDKAGFIKRQLVETRQITKHVARILDERFYTETDENNKKIRQVKIVTLKSNLVSNFRKEFELYKVREINDYHHAHDAYLNAVIGKALLGVYPQLEPEFVYGDYPHFHGHKENKATAKKFFYSNIMNFFKKDDVRTDKNGEIIWKKDEHISNIKKVLSYPQVNIVKKVEEQTGGFSKESILPKGNSDKLIPRKTKKFYWDTKKYGGFDSPIVAYSILVIADIEKGKSKKLKTVKALVGVTIMEKMTFERDPVAFLERKGYRNVQEENIIKLPKYSLFKLENGRKRLLASARELQKGNEIVLPNHLGTLLYHAKNIHKVDEPKHLDYVDKHKDEFKELLDVVSNFSKKYTLAEGNLEKIKELYAQNNGEDLKELASSFINLLTFTAIGAPATFKFFDKNIDRKRYTSTTEILNATLIHQSITGLYETRIDLSKLGGD

SEQ ID NO: 719 - protein, 1345 aa, Streptococcus mutans
MKKPYSIGLDIGTNSVGWAVVTDDYKVSAKKMKVLGNTDKSHIKKNLLGALLFDSGNTAEDRRLKRTARRRYTRRRNRILYLQEIFAEEMSKVDDSFFHRLEDSFLVTEDKRGERHPIFGNLEEEVKYHENFPTIYHLRQYLADNPEKVDLRLVYLALAHIIKFRGHFLIEGKFDTRNNDVQRLFQEFLAVYDNTFENSSLQEQNVQVEEILTDKISKSAKKDRVLKLFPNEKSNGRFAEFLKLIVGNQADFKKHFELEEKAPLQFSKDTYEEELEVLLAQIGDNYAELFLSAKKLYDSILLSGILTVTDVSTKAPLSASMIQRYNEHQMDLAQLKQFIRQKLSDKYNEVFSDVSKDGYAGYIDGKTNQEAFYKYLKGLLNKIEGSGYFLDKIEREDFLRKQRTFDNGSIPHQIHLQEMRAIIRRQAEFYPFLADNQDRIEKILTFRIPYYVGPLARGKSDFAWLSRKSADKITPWNFDEIVDKESSAEAFINRMTNYDLYLPNQKVLPKHSLLYEKFTVYNELTKVKYKTEQGKTAFFDANMKQEIFDGVFKVYRKVTKDKLMDFLEKEFDEFRIVDLTGLDKENKAFNASYGTYHDLRKILDKDFLDNSKNEKILEDIVLTLTLFEDREMIRKRLENYSDLLTKEQVKKLERRHYTGWGRLSAELIHGIRNKESRKTILDYLIDDGNSNRNFMQLINDDALSFKEEIAKAQVIGETDNLNQVVSDIAGSPAIKKGILQSLKIVDELVKIMGHQPENIVVEMARENQFTNQGRRNSQQRLKGLTDSIKEFGSQILKEHPVEHSQLQNDRLFLYYLQNGRDMYTGEELDIDYLSQYDIDHIIPQAFIKDNSIDNRVLTSSKENRGKSDDVPSKNVVRKMKSYWSKLLSAKLITQRKFDNLTKAERGGLTDDDKAGFIKRQLVETRQITKHVARILDERFHTETDENNKKIRQVKIVTLKSNLVSNFRKEFELYKVREINDYHHTHDAYLNAVIGKALLGVYPQLEPEFVYGDYPHFHGHKENKATAKKFFYSNIMNFFKKDDVRTDKNGEIIWKKDEHISNIKKVLSYPQVNIVKKVEEQTGGFSKESILPKGNSDKLIPRKTKKFYWDTKKYGGFDSPIVAYSILVIADIEKGKSKKLKTVKALVGVTIMEKMTFERDPVAFLERKGYRNVQEENIIKLPKYSLFKLENGRKRLLASARELQKGNEIVLPNHLGTLLYHAKNIHKVDEPKHLDYVDKHKDEFKELLDVVSNFSKKYTLAEGNLEKIKELYAQNNGEDLKELASSFINLLTFTAIGAPATFKFFDKNIDRKRYTSTTEILNATLIHQSITGLYETRIDLSKLGGD

SEQ ID NO: 720 - protein, 1345 aa, Streptococcus mutans; identical to SEQ ID NO: 719

SEQ ID NO: 721 - protein, 1345 aa, Streptococcus mutans
MKKPYSIGLDIGTNSVGWSVVTDDYKVPAKKMKVLGNTDKSHIEKNLLGALLFDSGNTAEDRRLKRTARRRYTRRRNRILYLQEIFSEEMGKVDDSFFHRLEDSFLVTEDKRGERHPIFGNLEEEVKYHENFPTIYHLRQYLADNPEKVDLRLVYLALAHIIKFRGHFLIEGKFDTRNNDVQRLFQEFLAVYDNTFENSSLQEQNVQVEEILTDKISKSAKKDRVLKLFPNEKSNGRFAEFLKLIVGNQADFKKHFELEEKAPLQFSKDTYEEELEVLLAQIGDNYAELFLSAKKLYDSILLSGILTVTDVGTKAPLSASMIQRYNEHQMDLAQLKQFIRQKLSDKYNEVFSDVSKDGYAGYIDGKTNQEAFYKYLKGLLNKIEGSGYFLDKIEREDFLRKQRTFDNGSIPHQIHLQEMRAIIRRQAEFYPFLADNQDRIEKLLTFRIPYYVGPLARGKSDFAWLSRKSADKITPWNFDEIVDKESSAEAFINRMTNYDLYLPNQKVLPKHSLLYEKFTVYNELTKVKYKTEQGKTAFFDANMKQEIFDGVFKVYRKVTKDKLMDFLEKEFDEFRIVDLTGLDKENKVFNASYGTYHDLCKILDKDFLDNSKNEKILEDIVLTLTLFEDREMIRKRLENYSDLLTKEQVKKLERRHYTGWGRLSAELIHGIRNKESRKTILDYLIDDGNSNRNFMQLINDDALSFKEEIAKAQVIGETDNLNQVVSDIAGSPAIKKGILQSLKIVDELVKIMGHQPENIVVEMARENQFTNQGRRNSQQRLKGLTDSIKEFGSQILKEHPVENSQLQNDRLFLYYLQNGRDMYTGEELDIDYLSQYDIDHIIPQAFIKDNSIDNRVLTSSKENRGKSDDVPSKDVVRKMKSYWSKLLSAKLITQRKFDNLTKAERGGLTDDDKAGFIKRQLVETRQITKHVARILDERFNTETDENNKKIRQVKIVTLKSNLVSNFRKEFELYKVREINDYHHAHDAYLNAVIGKALLGVYPQLEPEFVYGDYPHFHGHKENKATAKKFFYSNIMNFFKKDDVRIDKNGEIIWKKDEHISNIKKVLSYPQVNIVKKVEEQTGGFSKESILPKGNSDKLIPRKTKKFYWDTKKYGGFDSPIVAYSILVIADIEKGKSKKLKTVKALVGVTIMEKMTFERDPVAFLERKGYRNVQEENIIKLPKYSLFKLENGRKRLLASARELQKGNEIVLPNHLGTLLYHAKNIHKVDEPKHLDYVDKHKDEFKELLDVVSNFSKKYTLAEGNLEKIKELYAQNNGEDLKELASSFINLLTFTAIGAPATFKFFDKNIDRKRYTSTTEILNATLIHQSITGLYETRIDLSKLGGD

SEQ ID NO: 722 - protein, 1345 aa, Streptococcus mutans; identical to SEQ ID NO: 721

SEQ ID NO: 723 - protein, 1355 aa, Streptococcus mutans
MKKSYSIGLDIGTNSVGWAVVTDDYKVPAKKMKVLGNTDKSHIKKNLLGALLFDSGNTAEDRRLKRTARRRYTRRRNRILYLQEIFSEEMGKVDDSFFHRLDESFLTDDDKNFDSHPIFGNKAEEDAYHQKFPTIYHLRKHLADSTEKADLRLVYLALAHMIKFRGHFLIEGELNAENTDVQKLFADFVGVYDRTFDDSHLSEITVDASSILTEKISKSRRLEKLINNYPKEKKNTLFGNLIALSLGLQPNFKTNFKLSEDAKLQFSKDTYEEDLEELLGKIGDDYADLFTLAKNLYDAILLSGILTADDSSTKAPLSASMIKRYAEHHEDLEKLKEFIKANKPELYHDIFKDETKNGYAGYIENGVKQDEFYKYLKNTLSKIAGSDYFLDKIEREDFLRKQRTFDNGSIPHQIHLQEMHAILRRQGDYYPFLKENQDRIEKILTFRIPYYVGPLARKNSRFAWAEYHSDEAVMPWNFDQVIDKESSAQAFIEHMTNNDLYLPNEKVLPKHSPLYEKYTVYNELTKIKYVTEIGEAKFFDANLKQEIFDGLFKHERKVTKKKLRTFLDKNFDEFRIVDIQGLDKETETFNASYATYQDLLKVIKDKVFMDNPENAEILENIVLTLTLFEDREMIKQRLAKYADVFDKKVIDQLARRHYTGWGRLSAKLLNGIRDKQSCKTIMDYLIDDAQSNRNLMQLITDDNLTFKDDIVKAQYVDNSDDLHQVVQSLAGSPAIKKGILQSLKIVDELVKVMGKEPEQIVVEMARENQTTAKGRRNSQQRYKRLKEAIKSLDRDLNHKILKEHPTDNQALQNNRLFLYYLQNGRDMYTGESLDINRLSDYDIDHVIPQAFIKDNSIDNRVLTSSKANRGKSDDVPSEDVVNRMRPFWNKLLSSGLISQRKYNNLTKKELTPDDKAGFIKRQLVETRQITKHVARMLDERFNKEFDDNNKRIRRVKIVTLKSNLVSSFRKEFELYKVREINDYHHAHDAYLNAVVVKALLVKYPKLEPEFVYGEYPKYNSYRERKTATQKMFFYSNIMNMFKSKVKLADDQIVERPMIEVNDETGEIAWDKTKHITTVKKVLSYPQVNIVKKVEEQTIGQNGGLFDDNPKSPLEVIPSKLVPLKKALNPEKYGGYQKPTTAYPILLIVDTKQLIPISVMDKKRFEQNPVKFLKDKGYQQIEKNNFVKLPKYTLVDIGNGIKRLWASSKEVHKGNQLVVSKKSQDLLYHAHHLDNDYSNEYVKNHYQQFDILFNEITSFSKKCKLGKEHIQKIEEAYSKERDSASIEELADGFIKLLGFTQLGATSPFSFLGIKLNQKQYTGKKDYLLPCMEATLIHQSITGLYETRIDLNKLGGD

SEQ ID NO: 724 - protein, 1355 aa, Streptococcus mutans; identical to SEQ ID NO: 723

SEQ ID NO: 725 - protein, 1125 aa, Streptococcus mutans
MTNGKILGLDIGIASVGVGIINAKTGNVEHASSRIFPAANADNNVERRSARGGRRLIRRKKHRLKRVEDLFEKYNIDTDFSNLNLNPYQLRVKGLNEQLSNEELFAILKNIAKRRGISYLDDAEDDSVGSSDYAKAIDENRKLLKKQTPGEIQLKRLEKYGQLRGNFTIQDENGEYHRLINVFSTSDYVKEARRILETQSYYNKFITESFVEDYIKILQGKRKYYVGPGNEKSRTDYGIYRTDGETLDNLFGILIGKCGFYPEEYRAAKASYTAQEYNFLNDLNNLTVPTETKKLSTEQKYQLVDFAKTASTLEAAKLLKEIAKLVGCQVEEIKGYRLDNKDKPDLHTFEPFRKLKSNLTTIAVENLSITTLDTLAHILTLNTEREGIEEAIQKELPNIFSDEQITGIIAVRKKNSQIFGKGWHSFSIKLMKELIPELYETSEEQMTILIRLKKVKTNSKITNRTKYINEQEVTDEIYNPVVSKSIRQTVKIINAAIKKYGAFDQIVIEMPRESNEEDERKFIADLQKSNAKEKDDAMKQAALLYNGKAELPHGVFHGHKELATKIRLWYQQGERCLYSGKHIDIHDLIHNQHMFEIDHVLPLSLSFDDSLANKVLVYSWANQEKGQRTPFQALPQMASAWSFRELRDYISKQKGISKKKRDYLLTEQDINKVEVKQKFIERNLVDTRYVSRVVLNTLQDALKVMNKETKISVIRGQFTSQLRRQWRIDKSRETYHHHAVDALIIAASSQLRLWKKQNNPMFAEDKHGQKINLDTGEVLSDDAYKELVYQAPYQGFVNTISSKSFEDEILFSYQVDSKVNRKISDATIYATRQAQLGKDKKEETYVLGKIKDIYSQAGYDAFRKKYDKDKAVFLMYQKDPETWEKVIEVILRDYKELDDKGKEIGNPFERYKVKHGFVRKYSRKNKGTEIKSLKYYDNKLGNHIDITPNNSKHSVVLQSINPWRADLYFNPETTKYELMGLKYADLSFEKGTGKYSISREKYDEIKEREGISSKSEFKFTLYKNDLILVKDIGNHKELIARFNSKNDTSKHYVELKPWNKAKFDSEEELIPAFGKVAKSGQFIKGLNKPDLSIYKVKTDILGHKYYIKKEGDKPKLNFENKIKNK

SEQ ID NO: 726 - protein, 1125 aa, Streptococcus mutans
MTNGKILGLDIGIASVGVGIINAKTGNVEHASSRIFPAANADNNVERRSARGGRRLIRRKKHRLKRVEDLFEKYNIDTDFSNLNLNPYQLRVKGLNEQLSNEELFAILKNIAKRRGISYLDDAEDDSVGSSDYAKAIDENRKLLKKQTPGEIQLKRLEKYGQLRGNFTIQDENGEYHRLINVFSTSDYVKEARRILETQSYYNKFITESFVEDYIKILQGKRKYYVGPGNEKSRTDYGIYRTDGETLDNLFGILIGKCGFYPEEYRAAKASYTAQEYNFLNDLNNLTVPTETKKLSTEQKYQLVDFAKTASTLGAAKLLKEIAKLVGCQVEEIKGYRLDNKDKPDLHTFEPFRKLKSNLTTIAVENLSITTLDTLAHILTLNTEREGIEEAIQKELPNIFSDEQITEIIAVRKKNSQIFGKGWHSFSIKLMKELIPELYETSEEQMTILTRLKKVKTNSKITNRTKYINEEEITDEIYNPVVSKSIRQTVKIINATIKKYGAFDQIIIEMPRESNEEDERKFIADLQKSNAKEKDDAMKQAALLYNGKDELPHDVFHGHKELATKIRLWYQQGERCLYSGKHIDIHDLIHNQHMFEIDHVLPLSLSFDDSLANKVLVYSWANQEKGQRTPFQALPQMASAWSFRELRDYISKQKGISKKKRDYLLTEQDINKVEVKQKFIERNLVDTRYVSRVVLNTLQDALKVMNKETKISVIRGQFTSQLRRQWRIDKSRETYHHHAVDALIIAASSQLRLWKKQNNPMFAEDKHGQKINLDTGEVLSDDAYKELVYQAPYQGFVNTISSKSFEDEILFSYQVDSKVNRKISDATIYATRQAQLGKDKKEETYVLGKIKDIYSQAGYDAFRKKYDKDKAVFLMYQKDPETWEKVIEVILRDYKELDDKGKEIGNPFERYKVKHGFVRKYSRKNKGTEIKSLKYYDNKLGNHIDITPNNSKHSVVLQSINPWRADLYFNPETTKYELMGLKYADLSFEKGTGKYSISREKYDEIKEREGISSKSEFKFTLYKNDLILVKDIGNHKELIARFNSKNDTSKHYVELKPWNKAKFDSEEELIPAFGKVAKSGQFIKGLNKPDLSIYKVKTDILGHKYYIKKEGDKPKLNFENKIKNK

SEQ ID NO: 727 - protein, 1125 aa, Streptococcus mutans; identical to SEQ ID NO: 726

SEQ ID NO: 728 - protein, 1125 aa, Streptococcus mutans; identical to SEQ ID NO: 725

SEQ ID NO: 729 - protein, 670 aa, Streptococcus oralis
MAKFNKNYSIGLDIGVSSVGYAVVTEDYRVPAFKFKVLGNTEKEKIKKNLIGSTTFVPAQSAQGTRVFRVNRRRIDRRNHRIAYLRDIFQKEIGKIDKNFYRRLDESFRVLGDKSEDIQIKQPFFGNKELETAYHKKYPTIYHLRKHLADADKNSPVADIREVYMALSHIFKYRGHFLTLGKIDPNNINMQNSWIDFIESCQDAFDLEISDESKTIAAIFKSSDNRQEKVKGILSYFQPELAKKDKSIFKQLLQLLFGLKTKFKECFELEEEPDLNFSKENYDENLENLLGTLEEDFPDVFAKLKILRDTILLSDMLTYTGATHARFSATMVERYEEHRKDLQRFKSFVKQNLSEQDYLDIFGRKTPNGFDVDKETKGYVGYISNKMVLTNKQKTIQQNFYDYISGKITGIEGAEYFLNKISDGTFLRKLRTTDNGTIPNQIHAYELEKIIERQGRDYPFLLENKDKLLSILTFKIPYYVGPLAKGNNSRFAWIKRTTSQDVLDNNDEDTKNGKIRPWNYHKLINMDETRDAFITNLIGNDIILLNEKVLPKRSLIYEEVMLQNELTRIKYKDKYGKIHFFDSELRQEIINNLFKTNSKRVSSAMLLAYLENFTNLQAVEIVSGIEKGKSLNSTLKTYNDLKTIFSEDLLDSEIYQKELEEIIKVITVFV

SEQ ID NO: 730 - protein, 1373 aa, Streptococcus oralis
MENKNYSIGLDIGTNSVGWAVITDDYKVPSKKMKVLGNTDKRFIKKNLIGALLFDEGTTAEARRLKRTARRRYTRRKNRLRYLQEIFAEEMSKVDSSFFHRLDDSFLIPEDKKGSKYPIFATLIEEKEYHKQFPTIYHLRKQLADSKEKTDLRLIYLALAHMIKYRGHFLYEDTFDIKNNDIQKIFNEFISIYNNTFEGNSLSGQNVQVEAIFTDKISKSAKRERVLKLFPDEKSTGLFSEFLKLIVGNQADFKKHFDLEEKAPLQFSRDTYDEDLENLLGQIGDDFADLFVAAKKLYDAILLSGILTVTDPSTKAPLSASMIERYENHQKDLATLKQFIKTNLPEKYDEVFSDQSKDGYAGYIDGKTTQESFYKYIKNLLSKFEGADYFLEKIEREDFLRKQRTFDNGSIPHQIHLQEMNAILRRQGEHYPFLKENKEKIEKILTFRIPYYVGPLARGNRDFAWLTRNSDQAIRPWNFEEIVDKASSAESFINKMTNYDLYLPEEKVLPKHSLLYETFAVYNELTKVKFIAEGLRDYQFLDSRQKKDIFYTLFKAEDKRKVTEKDIIQYLHTVDGYDGIELKGIEKQFNASLSTYHDLLKIIKDKEFMDDPNNEEILENIVHTLTIFEDREMIKQRLAQYDSLFDEKVIKALTRRHYTGWGKLSSKLINGIRDKQTGKTILDYLMDDGYNNRNFMQLINDDELSFKEIIKKAQVVGKTDDVKQVVQELPGSPAIKKGILQSIKLVDELVKVMGHEPESIVIEMARENQTTARGKKNSQQRYKRIEDSLKILASGLNAKILKEHPTDNIQLQNDRLFLYYLQNGRDMYTGKPLDINQLSSYDIDHIVPQAFIKDDSLDNRVLTSLKDNRGKSDNVPSLEVVEKMKTFWQQLLDSKLISYRKFNNLTKAERGGLDERDKVGFIKRQLVETRQITKHVAQILDARYNTEVNEKDKKNRTVKIITLKSNLVSNFRKEFRLYKIREINDYHHAHDAYLNAVVAKAILKKYPKLEPEFVYGDYQKYDLKRYISRSKDPKEIEKATEKYFFYSNLLNFFKEEVHYADGTIVKRENIEYSKDTGEIAWNKEKDFATIKKVLSLPQVNIVKKREVQTGGFSKESILPKGNSDKLIPRKTKDILWDTTKYGGFDSPVIAYSILLIADIEKGKAKRLKTVKTLVGITIMEKATFEKSPIAFLENKGYHNVRKENILCLPKYSLFELKNGRRRMLASAKELQKGNEIVLPVHLTTLLYHAKNIHRLDEPEHLEYIQKHRNEFKGLLNLVSEFSQKYVLADANLEKIKNLYADNEQADIEILANSFINLLTFTALGAPAAFKFFGKDVDRKRYTTVSEILNATLIHQSITGLYETRIDLSKLGED

SEQ ID NO: 731 - protein, 1371 aa, Streptococcus oralis
MENKNYSIGLDIGTNSVGWSVITDDYKVPSKKMKVLGNTDKRFIKKNLIGALLFDEGTTAEARRLKRTARRRYTRRKNRLRYLQEIFAEEMSKVDSSFFHRLDDSFLIPEDKRGSKYPIFATLAEEKEYHKQFPTIYHLRKQLADSKEKTDLRLIYLALAHMIKYRGHFLYEDTFDIKNNDIQKIFSEFISIYDNTFEGSSLSGQNAQVEAIFTDKISKSAKRERVLKLFPDEKSTGLFSEFLKLIVGNQADFKKHFDLGEKAPLQFSKDTYDEDLENLLGQIGDDFADLFLVAKKLYDAILLSGILTVTDPSTKAPLSASMIERYENHQKDLAVLKQFIKNNLPEKYDEVFSDQSKDGYAGYIDGKTTQEAFYKYIKNLLSKFEGTDYFLEKIEREDFLRKQRTFDNGSIPHQIHLQEMNAILRRQGEHYPFLKDNKEKIEKILTFRIPYYVGPLARGNRDFAWLTRNSDEAIRPWNFEEIVDKASSAEDFINKMTNYDLYLPEEKVLPKHSLLYETFAVYNELTKVKFIAEGLRDYQFLDSGQKKQIVTQLFKEKRKVTEKDIIQFLHNVDGYDGIELKGIEKQFNASLSTYHDLLKIIKDKEFMDDSKNEEILENIVHTLTIFEDREMIKQRLAQYDSLFDEKVIKALIRRHYTGWGKLSAKLIDGICDKQTGNTILDYLIDDGKNNRNFMQLINDDGLSFKEITQKAQVVGKTDDVKQVVQELPGSPAIKKGILQSIKIVDELVKVMGHTPESIVIEMARENQTTARGKKNSQQRYKRIEDALKNLASGLDSNILKEHPTNNIQLQNDRLFLYYLQNGRDMYTGKPLDINQLSSYDIDHIVPQAFIKDDSLDNRVLTSLKDNRGKSDNVPSIEVVQKRKAFWQQLLDSKLISERKFNNLTKAERGGLDERDKVGFIKRQLVETRQITKHVAQILDARFNKEVNEKDKKNRTVKIITLKSNLVSNFRKEFRLYKVREINDYHHAHDAYLNAVVAKAILKKYPKLEPEFVYGDYQKYDLKRYISRSRNPKEVEKATEKYFFYSNLLNFFKEEVHYADGTIVKRENIEYSKDTGEIAWNKEKDFATIKKVLSYPQVNIVKKREVQTGGFSKESILPKGNSDKLIPRKTKDILWETTKYGGFDSPVIAYSILLIADIEKGKAKKLKTVKTLVGITIMEKAAFEENPITFLENKGYHNVRKENILCLPKYSLFELENGRRRLLASAKELQKGNEIVLPVYLTTLLYHSKNVHKLDEPEHLEYIQKHRNEFKDLLNLVSEFSQKYVLADANLEKIQNLYADNEQADIEILANSFINLLTFTALGAPAAFKFFGKDIDRKRYTTVSEILNATLIHQSITGLYETRIDLSKLGED

SEQ ID NO: 732 - protein, 1121 aa, Streptococcus oralis
MNGLVLGLDIGIASVGVGILEKNSGKIIHANSRLFPAATADNNVERRKNRQARRLNRRKKHRGVRFQDLFEDYGLLTDFSKVSINLNPYRLRVDGLNQQLTNEELFIALKNIVKRRGISYLDDASEDGGAVSSDYGKAVEENRKLLAEQTPGQIQLERFEKYGQVRGDFTVVENGEKCRLINVFSTSAYRKEAEKILRKQQEFNNQITDEFIEDYLKILTGKRKYYHGPGNEKSRTDYGRFRTDGTTLDNIFGVLIGKCTFYPNEYRASKSSYTAQEFNLLNDLNNLTVPTETKKLSEEQKKVIVEYAKEAKTLGASTLLKYIVKMIDASVDQISGYRVDVNNKPEMHTFEVYRKMQSLETISVGELSRNVLDELAHILTLNTEREGIEEAINSKLMGVFSQDQVLELVQFRKNNSSLFSKGWHNFSLKLMMELIPELYETSEEQMTILTRLGKQKSKETSKRTKYIDEKELTEEIYNPVVAKSVRQAIKIINEATKKHGIFDNIVIEMARENNEEDAKKDYIKRQKANQDEKNAAMEKAAFQYNGKKELPGNIFNGHKELATKIRLWHQQGEKCLYTGKTIPISDLIHNQYKYEIDHILPLSLSFDDSLSNKVLVHATANQEKGQRTPFQALDSMDDAWSYREFKSYVKDLKSLSNKKKDYLLTEEDISKIEVKQKFIERNLVDTRYSSRVVLNALQDFYKSHQFDTTISVVRGQFTSQLRRKWGLEKSRETYHHHAVDALIIAASSQLRLWKKQNNPLITYKEGQFVDSQTGEIISLTDDEYKELVFKAPYDHFVDTLHSKTFEDGILFSYQVDSKYNRKISDATIYATRKAKLDKDKSEETYVLGKIKDIYSQAGYDAFIKIYNKDKRKFLMYHKDPQTFEKVIEEILRTYPSKERNDKNKEVPCNPFEKYRQENGPIRKYSKKGNGPEIKCLKYYDNKLGNYIDISPDGSDNQVVLQSLKPWRTDVYFNHQTKEYELMGLKYSDLSFEKGSGKYSISNEKYNSIKRIEGVNEQSEFKFTLYKNDLILIKDSENNEQKLFRFNSRNDTAKHYVELKPYDKARFDGQQELITILGNVAKGGQCLKGLNKSNISIFKVKTDVLGKKHIIKKEGDEPKLKF

SEQ ID NO: 733 - protein, 1134 aa, Streptococcus oralis
MNGLVLGLDIGIASVGVGILEKNSGKIVHASSRIFPAATADNNVERRKNRQARRLHRRKKHRGARLKDLFEYYGLLTDFSKVSINLNPYRLRVDGLDQQLTNEELFIALKNIVKRRGISYLDDASEDGGTVSSDYGKAVEENRKLLAEQTPGQIQLERFEKYGQLRGDFTVVENSEKCRLINVFSTSAYKKEAERILRKQQEFNNQITDEFIEDYLKILTGKRKYYHGPGNEKSRTDYGRFRTDGATLDNIFGILIGKCTFYPNEYRASKASYTAQEFNLLNDLNNLTVPTETKKLSEEQKKTIIEYAKSAKTLGASTLLKYIAKMIDASVDQIRGYRVDVNNKPEMHTFEVYRKMQSLETISVGELSRNILDELAHILTLNTEREGIEEAINTKLRDSFSQDQVLELVQFRKNNSSLFSKGWHNFSLKLMMELIPELYETSEEQMTILTRLGKQKSKETSKRTKYIDEKEVTEEIYNPVVAKSVRQAIKIINEATKKHGIFDNIVIEMARENNEEDAKKDYIKRQKANQDEKYAAMEKAAFQYNGKKELPDNIFHGHKELATKIRLWHQQGEKCLYTGKSIPISDLIHNQYKYEIDHILPLSLSFDDSLSNKVLVLATANQEKGQRTPFQALDSMDDAWSYREFKSYVKESKLLGNKKKEYLLTEEDISKIEVKQKFIERNLVDTRYSSRVVLNALQDFYKNHNFDTTISVVRGQFTSQLRRKWGLEKSRETYHHHAVDALIIAASSQLRLWKKQNNPLIAYKEGQFVDSQTGEIISLTDDEYKELVFKAPYDHFVDTLSSKTFEDSILFSYQVDSKFNRKISDATIYATRKAKLDKEKKEYTYTLGKIKDIYSLGTKTPSKTGFYKFLDLYNKDKSQFLMFQKDRKTWDEVIEKIMEQYRPFKEYDKAGKLVDFNPFEKYRQENGPIRKYSKKGNGPEIKSLKYYDILLGKHKNITPEGSRNTVALLSLNPWRTDVYYNMETKKYEFLGLKYADLPFEEGGAYGISTETYNELREKEGIGKNSEFKFTLYKNDLILIKDTETNCQQFFRFWSRTGKDNPKSFEKHKIELKPYEKAKFEKGEELEVLGKVPPSSNQFQKNMQIENLSIYKVKTDVLGNKHFIKKEGDKPKLKF

SEQ ID NO: 734 - protein, 550 aa, Streptococcus oralis
MYSLDKNGSPTPLYRDQLNQYEVDHIIPYSFLPIDSIDNKVLTHRENNQRKLDNIPDKETVANMKPFWEKLYNAKLISQTKYQRLTTSERTPDGVLTESMKAGFIERQLVETRQIIKHVARILDNRFSDTKIITLKSQLVTNFRNTFHIAKIRELNDYHHAHDAYLAVVVGQTLLKAYPKLAPELIYGHHAHFNRHEENKATIRKYLYSNIMRFFNNPDSKVSKDIWDCNRDLPIIKDIIYNSQVNFVKRTMIKKGAFYNQNPVGKFNKQIAANNRYPLKTKVSSLDTSIYGGYGPMNSALSIIIIAERFNEKKCKIETVKEFHDIFIIDYKKFNNDPFQFLNDTSENGFLKKNNINRVLAFYRVPKYSLMQKIDGTRMLFESKSNLHKATQFKLTKTQNELFFHMRRLLTKSNLMDLKSESAIKESQNFILKHKEEFDNISNQLSAFSQKMLGDTTSLKNLIKGYNERKIKEINSSEETIKYFYDNFIKMFSFVKSGAPKDINDFFNNKYTVARMRPKPDKKLLNATLIHQSITGLYETRIDLSKLGED

SEQ ID NO: 735 - protein, 1140 aa, Streptococcus parasanguinis
MNGLVLGLDIGIASVGVGILKKDIGEIIHTNSRLFSAATADSNIERRGHRGGKRLTRRKKHRSIRLHDLFEDFGLLTDFSKVSINLNPYQLRVQGLDNQLTNEELFIALKNIVKRRGISYLDDASEDGGTVSSDYGKAVEENRKLLAEQTPGQIQLDRFEKYGQVRGDFNVVENGEKRRLINVFTTSAYSKEAERILRKQQEFNKKITDEFIEDYLTILTGKRKYYHGPGNEKSRTDYGRYTTKKDPEGKYITLDNIFGILIGKCTFYPDEYRASKASYTAQEFNLLNDLNNLTVPTETKKLSEEQKKTIIKYAKTAKTLGASTLLKYIAKLIGASVDQIHGYRIDPNKKPEMHTFETYRKMQSLETISVEELPRKVLDELAHILTLNTEREGIEEAINATLKDTFSQDQVLELVQFRKNNSSLFSKGWHSFSLKLMMELIPELYETSEEQMTILTRLGKQKSKETSKRTKYIDEKELTEEIYNPVVAKSVRQAIKIINEATKKYGIFDNIVIEMARENNEEDAKKEYIKRQKANLDEKNAAMEKAAFQYNGKKELPDNVFHGHKELATKIRLWHQQGEKCLYTGKNIPISDLIQNQYKYEIDHILPLSLSFDDSLSNKVLVLATANQEKGQRTPFQALDSMDDAWSYREFKSYVKDSKLLGNKKKEYLLTEEDISKIEVKQKFIERNLVDTRYSSRVVLNALQDFYKEHQFDTTISVVRGQFTSQLRRKWGLEKSRETYHHHAVDALIIAASSQLRLWKKQNNPLISYTEGQFVDQVTGEIISLSDDEYKELVFKAPYDHFVDTLKSKKFEDSILFSYQVDSKYNRKISDATIYATRKAKLDKENKEYTYTLGKIKDIYALGTKSPSKTGFYKFLDLYNKDKSQFLMFQKDRKTWDEVIEKIIEQYRPFKEYDENGKEVDFNPFEKYRIENGPIRKYSKKGNGPEIKSLKYYDNLLGKFVDITPSESKNPVALLSLNPWRTDVYYNTETSKYEFLGLKYADLCFEKGGAYGISEVKYNKIREKEGIGKESEFKFTLYKNDLILIKDTETNCQQIFRFWSRTGKDNPKSFEKHKIELKPYEKARFEKGEELEVLGKVPPSSNQLQKNMQIENLSIYKVKTDVLGNKHFIKKEGEEPKLKF

SEQ ID NO: 736 - protein, 1374 aa, Streptococcus pseudoporcinus
MKKRYSYSIGLDIGTNSVGWAVINEDYKVPAKKMTVFGNTDRKTIKKNLLGTVLFDSGETAQARRLKRTNRRRYTRRRYRLCQLQNIFATEMVKVDDTFFQRLSESFFYYQDKAFDKHPIFGNSKEERAYHKTYPTIYHLRKDLADRDQKADLRLIYLALSHIIKFRGHFLIEGKLNSENTDVQKLFIALVTVYNLLFEEEPIAGETCDAKALLTAKTSKSKRLESLISEFPGQKKNGLFGNLLALALGLRPNFKSNFGLSEDAKLQITKDTYEEELDNLLAEIGDHYADLFLAAKNLSDAILLSDILTLSDENTRAPLSASMIKRYEEHQEDLALLKKLVKEQMPEKYWEIFSNAKKNGYAGYIEGKVSQEDFYRYIKPILSRLKGGDEFLAKIDRDDFLRKQRTFDNGSIPHQIHLKELHAILRRQEKYYPFLAEQKEKIEQLLCFRIPYYVGPLAKGGNSSFAWLKRRSDEPITPWNFKDVVDEEASAQAFIEGMTNYDTYLPEEKVLPKHSPLYEMFTVYNELTKVKYIAENMTKPLYLSAEQKEAIIDHLFKQTRKVTVKDLKEKYFSQIEGLENVDVTGVEGAFNASLGTYNDLLKIIKDKAFLDDEANAEILEEIVLILTLFQDEKLIEKRLAKYANLFEKSVLKKLRKRHYRGWGRLSRQLIDGMKDKASGKTILDFLKADDFANRNFIQLINDSSLDFEKLIDDAQKKAIKRESLTEAVANLAGSPAIKKGILQSLKVVDEIVKVMGHNPDNIVIEMSRENQTTAQGLKNARQRLKKIKEVHKKTGSRILEDNSERITNLTLQDNRLYLYLLQDGKDMYTGQDLDINNLSQYDIDHIIPQSFIKDNSIDNLVLTTQKANRGKSDNVPSIEVVRDMKDRVWRRQLANGAISRQKFDHLTKAERGGLADSDKARFLRRQLVETRQITKHVAQLLDSRFNSKSNQNKKLARNVKIITLKSKIVSDFRKDFGLYKLREVNNYHHAHDAYLNAVVGTALLKKYPKLEAEFVYGDYKHFDLVKLISKSDPSLGKATAKVFFYSNIMNFFKEELSLADGTLMKRPVIETNTETGEVVWDKVKDFKTIRKVLSYPQVNIVKKTEIQSGAFSKESVLSKGNSDKLIERKKGWDPKKYGGFDSPNTAYSIFVVAKVAKRKAQKLKTVKEIVGITIMEQAEYEKDNIAFLEKKGYQDIQEKLLIKLPKYSLFELENGRRRLLASANEFQKGNELALSGKYMKFLYLASRYDKLSSKIESEQQKKLFVEQHLHYFDEILDIVVKHATCYIKAENNLKKIISLYKKKEAYSINEQALNMLNLFIFTSLGAPSTFVFFDETIDRKRYTTSSDVLNGILIQQSITGLYETRIDLSRFGGD

SEQ ID NO: 737 - protein, 1052 aa, Streptococcus pyogenes
LSASMIKRYDEHHQDLTLLKALVRQQLPEKYKEIFFDQSKNGYAGYIDGGASQEEFYKFIKPILEKMDGTEELLAKLNREDLLRKQRTFDNGSIPHQIHLGELHAILRRQEDFYPFLKDNREKIEKILTFRIPYYVGPLARGNSRFAWMTRKSEETITPWNFEEVVDKGASAQSFIERMTNFDKNLPNEKVLPKHSLLYEYFTVYNELTKVKYVTEGMRKPAFLSGEQKKAIVDLLFKTNRKVTVKQLKEDYFKKIECFDSVEISGVEDRFNASLGTYHDLLKIIKDKDFLDNEENEDILEDIVLTLTLFEDREMIEERLKTYAHLFDDKVMKQLKRRRYTGWGRLSRKLINGIRDKQSGKTILDFLKSDGFANRNFMQLIHDDSLTFKEDLQKAQVSGQGDSLHEHIANLAGSPAIKKGILQTVKVVDELVKVMGRHKPENIVIEMARENQTTQKGQKNSRERMKRIEEGIKELGSDILKEYPVENTQLQNEKLYLYYLQNGRDMYVDQELDINRLSDYDVDHIVPQSFLKDDSIDNKVLTRSDKNRGKSDNVPSEEVVKKMKNYWKQLLNAKLITQRKFDNLTKAERGGLSELDKAGFIKRQLVETRQITKHVAQILDSRMNTKYDENDKLIREVRVITLKSKLVSDFRKDFQFYKVREINNYHHAHDAYLNAVVGTALIKKYPKLESEFVYGDYKVYDIRKMIAKSEQEIGKATAKYFFYSNIMNFFKTEITLANGEIRKRPLIETNGETGEIVWDKGRDFATVRKVLSMPQVNIVKKTEVQTGGFSKESILPKRNSDKLIARKKDWDPKKYGGFDSPTVAYSVLVVAKVEKGKSKKLKSVKELVGITIMERSSFEKDPVDFLEAKGYKEVRKDLIIKLPKYSLFELENGRKRMLASAGELQKGNELALPSKYVNFLYLASHYEKLKGSPEDNEQKQLFVEQHKHYLDEIIEQISEFSKRVILADANLDKVLSAYNKHRDKPIREQAENIIHLFTLTNLGAPAAFKCFDTTIGRNRYKSIKEVLDATLIHQSITGLYETRIDLSQLGGD

SEQ ID NO: 738 - protein, 1368 aa, Streptococcus pyogenes; identical to SEQ ID NO: 37

SEQ ID NO: 739 - protein, 1367 aa, Streptococcus pyogenes; identical to SEQ ID NO: 241

SEQ ID NO: 740 - protein, 1368 aa, Streptococcus pyogenes [sequence omitted]

SEQ ID NO: 741 - protein, 1370 aa, Streptococcus ratti
MKKPYSIGLDIGTNSVGWAVITDDYKVPAKKMKVLGNTDKNYIKKNLLGALLFDSGNTAEDRRLKRTARRRYTRRRNRLLYLQDIFSDEMNKVDESFFHRLEDSFLVSEDKRGDHHPIFGNVVDEVKYHEQFPTIYHLRKYLADTPEKADLRLVYLALAHMIKFRGHFLIDDPKLDVKNTDSQELFSQFLTAYDVTQEDSHLADVKINISDIITEKMNKSRKVEALLFHFPSQKKNSFFGNLVSLVFGLLPNFKTNFNLAEDAKLQLSKDSYDEDLENLLGQIGDEYTDVFVAARKLYDSILLSGILTVNDLSTKAILSASMVRRYEEHNKDLAKLKAFVKANFTHDVFKEVFSDASKNGYAGYIEGKTSQEDFYKYVKNLIGKVDGSADFIEKIDREDFLRKQRTFDNGSIPHQVHLAEMKAILRRQGEYYPFLKEHAEKIQQILTFRIPYYVGPLDRHGHSDFAWASFNSEEKVTPWNFEEIIDKNKSAQAFIERMTNQDLYLPNEKVLPKHSPLYEKYTVYNELTKIKYVTETGTAKFFDANLKQEIFDGLFKKERKVTKRKLLTFLEKNFDEFRIVDIQGLDKETETFNASYGIYQDLLKIIKDKAFMDDSENADILEDIVLTLTLFEDREMIKQRLAKYADLFDKKVIDNLARRRYTGWGRLSAKLLNGIRDKRSRKTIMDYLVDDGRSNRNLMQLITDDNLTFKDEIAKAQYSDNSDDLHQVVQDLAGSPAIKKGILQSVKIVDELVKVMGYEPEQIVVEMARENQTTAKGRRNSQQRYKRLEEAIKNLDRDLNYKILKEHPTDNQALQNDRLFLYYLQNGRDMYTGESLDINRLSDYDIDHIIPQAFIKDNSIDNRVLVSSAKNRGKSDDVPSEDVVNRMRPFWNKLLNCGLISQRKYSNLTKKELTPNDKAGFIKRQLVETRQITKHVARILDEHFNKEFDEDKKRIRKVKVVTLKSNLVSNFRKEFELYKVREINDYHHAHDAYLNAVVAKALLMKYPKLEPEFVYGEYPKYNSYRERKTATQRMFFYSNIMNMFKSKVKLADERIIERPMIEVNDETGEIAWDKTKHIATVKKVLSYPQINIVKKVEEQTGGLTNETIYPRGSFDKLLNRKNTLEASKYGGFGSPTVAYCVLVVADSKNENGKVKKLKLGSELLGITILEKNDFENNSLDFLSRKGYQGVQEKKIIKLPKYSLFEFQDGSRRMLSSVMANDNKRGDLQKANEMILPAYLVKLLYHAKHINSVGEPAHKNYINEHCSEFQDLLNYIRQFADKFVDVDKNLSKIRSLSKSMAEYSVSEICSSFVNLLTLTALGAPADFKFFGTTIPRKRYGSPQSILSATLIHQSITGLYETRIDLSKLGED

SEQ ID NO: 742 - protein, 1135 aa, Streptococcus salivarius
MSDLVLGLDIGIGSVGVGILNKVTGEIIHKNSRIFPAAQAENNLERRTNRQGRRLTRRKKHRRVRLNHLFEESGLITDFTKVSINLNPYQLRVKGLTAELSNEELFIALKNMVKHRGISYLDDASDDGNSSVGDYAQIVKENSKQLETKTPGQIQLERYQKYGQLRGDFTVEEDGRKHRLINVFPTSAYHAEALRILQTQQEFNPQITDEFINSYLEILTGKRKYYHGPGNEKSRTDYGKYTTKKDAQGQYITLNNIFGILIGKCTFYPEEYRAAKASYTAQEFNLLNDLNNLTVPTETKKLSEEQKYQIITYVKNEKAMGPAKLFKYIAKLLACDIADIKGYRIDKSDKAEIHTFEAYRKMKTLETIDIEQIEREKLDKLAYVLTLNTEREGIQEALDHEFADGTFSQEQVDELVQFRKANSSIFGKGWHSFSVKLMMELIPELYATSEEQMTILTRLGKQKTTSSSNKTKYIDEKQLTEEIYNPVVAKSVRQAIKIVNAAIKKYGDFDNIVIEMARETNEDDEKKAIQKIQKANKAEKDAAMRKAANQYNGKAELPHSVFHGHKQLATKIRLWHQQGERCLYTGKTISIHDLINNPNQFEIDHILPLSITFDDSLANKVLVYATANQEKGQRTPYQALDSMDDAWSFRELKAFVRESKALSNKKKEYLLTEEDISKFDVRKKFIERNLVDTRYASRVVLNALQEHFKAHKIDTKVSVVRGQFTSQLRRHWGIDKTRDTYHHHAVDALIIAASSQLNLWKKQKNTLVSYSEDQLLDIETGELISDDEYKESVFKAPYQHFVDTLKSKEFEDSILFSYQVDSKFNRKISDATIYATRQAKVGKDKKDETYVLGKIKDIYALGTKTPSKTGFYKFLDLYNKDKSQFLVYQKDRKTWDEVIEKIMEQYRPFKESDKNGKEVDFNPFEKYRIENGPIRKYSRKGNGPEIKSLKYYASKLGNHIDITPKDSNNKVVLQSVSPWRADVYFNKTTGSYEILGLKYADLQFEKGTGTYRISEEKYNDIKKKEGVDSDSEFKFTLYKNDLLLIKDTETKEQRLFRFLSRSMPNKKHYVELKPYSKDKFEKNESLIEILGSADKSGRCIKGLAKSNLSIFKVRTDVLGNQHIIKNEGDKPKLDF

SEQ ID NO: 743 - protein, 1127 aa, Streptococcus salivarius
MSDLVLGLDIGIGSVGVGILNKVTGEIIHKNSRIFPAAQAENNVERRINRQGRRLTRRKKHRRVRLNHLFEESGLITDFTNVSINLNPYQLRVKGLTDELSNEELFIALKNMVKHRGISYLDDASDDGNSSVGDYAQIVKENSKQLETKTPGQIQLERYQKYGQLRGDFTVEEDGKKHRLINVFPTSAYRAEALRILQTQQEFNPQITDEFINSYLQILTGKRKYYHGPGNEKSRTDYGRYTTKKDSEDEYITLDNIFGILIGKCTFYPEEYRAAKASYTAQEFNLLNDLNNLTVPTETKKLSEEQKNQIITNVKNEKAMGPAKLFKYIAKLLSCDVADIKGYRIDKSDKAEIHTFEAYRKMKTLATIDIEQMERENLDKLAYVLTLNTEKEGIQEALEHEFADGTFSQEQIDELVQFRKANSSIFGKGWHSFSVKLMMELIPELYATSEEQMTILTRLGKQKTTSSSNKTKYIDEKQLTEEIYNPVAAKSVRQAIKIVNAAIKEYGDFDNIVIEMARETNEDDEKKAIQKIQKANKDEKDAAMLKAANQYNGKAELPHSVFHGHKQLATKIRLWHQQGERCLYTGKTISIHDLINNSNQFEIDHILPLSITFDDSLANKVLVYATANQEKGQRTPYQALDSMDDAWSFRELKAFVRDSKALSNKKKEYLLTEEDISKFDVRKKFIERNLVDTRYASRVVLNALQEHFRVHKTDTKVSVVRGQFTSQLRRHWGIEKTRDTYHHHAVDALIIAASSQLNLWKKQKNTLVSYSEDQLLDIETGELISDDEYKESVFKAPYQHFVDTLKSKEFEDSILFSYQVDSKFNRKISDATIYATRQAKVGKDKKDETYVLGKIKDIYSQTGYDAFIKIYKKDKSKFLMYRHDPQTFEKVIEPILENYPNKELNEKGKEVPCNPFLKYKEDHGYIRKYSKKGNGPEIKSLKYYDSKLGNHIDITPKNSNNKVVLQSVSPWRADVYFNKTTGKYEILGLKYADLKFEKGTGTYKISEEKYNDIKIKEGVDSDSEFKFTLYKNDLLLIKDTETKEQQLFRFLSRTMPNVKHYVELKPYDKQKFDDNEELIKILGIVAKGGQCKKGVSKPNISIYKIRTDVLGNQHIIKNEGDKPKLDF

SEQ ID NO: 744 - protein, 1385 aa, Streptococcus salivarius
MTKPYSIGLDIGTNSVGWAVITDDYKVPSKKMKVLGNTSKKYIKKNLLGALLFDSGITAEGRRLKRTARRRYTRRRNRILYLQEIFSTEMATLDDAFFQRLDDSFLVPDDKRDSKYPIFGNLVEEKVYHDEFPTIYHLRKHLADSSKKADLRLVYLALAHMIKYRGHFLIEGDFNSKNNDLQKNFQDFLDTYNAIFESDLSLENSKQLEEIVKDKISKSAKKDRILKLFPGEKNSGIFSEFLKLIVGNQADFRKYFNLDEKTSLQFSKESYDEDLETLLGHIGDDYSDVFLKAKKLYDAILLSGILTVTDNGTEAPLSSAMIMRYKEHEEDLALLKAYIRNISLETYNEVFKDNTKNGYAGYIDGKTSQEDFYVYLKRLLAGLEGADYFLEKIDREDFLRKQRTFDNGSIPYQIYLQEMRAILDKQAKFYPFLAKNKERIEKILTFRIPYYVGPLARGNSDFAWSIRKRNEKITPWNFEDVIDKESSAEAFINRMTSFDLYLPEEKVLPKHSLLYENFTVYNELTKVRFIAEGMRDYQFLDSKQKKDIVRLYFKGKRKVTDKDIIEYLHAIDGYDGIELKGIEKQFNSSLSTYHDLLNIINDKEFLDDSSNETIIEEIIHTLTMFEDREMIKQRLSKFDNIFDKSVLKKLSRRHYTGWGKLSAKLINGIRDEKSGNTILDYLIDDGVSNRNFMQLIHDDALSFKKKIKKAQIIGDKDNIKQVVKSLPGSPAIKKGILQSIKIVDELVKVMGREPESIVVEMARENQYTNQGKSNSQQRLKRLEESLKGLGSKILKENVPTRLSKIDNNALQNDRLYLYYLQNGKDMYTGEELDIDRLSNYDIDHIIPQAFLKDDSIDNKVLVSSASNRGKSDDVPSLEVVKKRKTLWYQLLKSKLISQRKFDNLTKAERGGLSQEEKAGFIQRQLVETRQITKHVARLLDERFNNKKDENNRTLRTVKIITLKSSLVSQFRKDFELYKVREINDFHHAHDAYLNAVVASALLKKYPKLEPEFVYGDYPKYNSFRERKSATEKVYFYSNIMNIFKKSIPLADGTVIDRPLIEVNEETGESVWNKVADLNTVRKVLSYSQVNIVKKVEEQNHGLDRGKPKGLFNANLSSKPKPNSKENLVGAKEYLDPKKYGGYAGISNSFAILVKGTIEKGAKKKITNVLEFQGISILDRIYYRKDKLNFLLEKGYKDIELIIELPKYSLFELSDGSRRMLASILSTNNKRGEIHKGNQIFISQKFVKLLYHAKRISSTFNENHRKYVENHKKEFEELFYYILEFNENYVGAKKNGELLKSAFQSWQNHSIDELCSSFIGPTGSERKGLFELTSRGGAADFEFLGVKIPRYRDYTPSSLLKDATLIHQSVTGLYETRIDLGKLGED

SEQ ID NO: 745 - protein, 1392 aa, Streptococcus sanguinis
MENKNYSIGLDIGTNSVGWAVITDDYKVPSKKMKVFGNTDKHFIKKNLIGALLFDEGATAEDRRLKRTARRRYTRRKNRLRYLQEIFSEEISKLDSSFFHRLDDSFLVPKDKRGSKYPIFATLEEEKEYHKKFPTIYHLRKHLADSKEKTDLRLIYLALAHMIKYRGHFLYEESFDIKNNDIQKIFNEFISIYDNTFEGSSLSGQNAQVEAIFTDKISKSAKRERVLKLFSDEKSTSLFSEFLKLIVGNQADFKKHFDLEEKAPLQFSKDTYDEDLENLLGQIGDGFTDLFLVAKKLYDAILLSGILTVTDPSTKAPLSASMIERYESHQKDLAALKQFIKNNLPKRYNEVFSDQSKDGYAGYIDGKTTQEAFYKYIKNLLSKFEGADYFLDKIEREDFLRKQRTFDNGSIPHQIHLQEMNAILRRQGEHYPFLKENREKIEKILTFRIPYYVGPLARGNRDFAWLTRNSDQAIRPWNFEEIVDKASSAEEFINKMTNYDLYLPEEKVLPKHSLLYETFAVYNELTKVKFIAEGLRDYQFLDSGQKKQIVNQLFKEKRKVTEKDIIHYLHNVDGYDGIELKGIEKQFNASLSTYHDLLKIIKDKEFMDDPKNEEILENIVHTLTIFEDREMIKQRLAQYDSIFDEKVIKALTRRHYTGWGKLSAKLINGICDKQTGDTILDYLIDDGKINRNFMQLINDDGLSFKEIIQKAQVVGKTDDVKQVVQELPGSPAIKKGILQSIKIVDELVKVMGYAPESIVIEMARENQTTARGKKNSQQRYKRIEDSLKNLAPGLDSNILKENPTDNIQLQNDRLFLYYLQNGKDMYTGKPLDIDQLSSYDIDHIIPQAFIKDDSIDNRVLTSSKDNRGKSDNVPSLEVVQKRKAFWQQLLDSKLISERKFNNLTKAERGGLDERDKVGFIRRQLVETRQITKHVAQILDASFNTEVNEKNQKIRTVKIITLKSNLVSNFRKEFELYKVREINDYHHAHDAYLNAVVAKAILKKYPKLEPEFVYGDYQKYDLKRYISRFKPSKEIEKATEKYFFYSNLLNFFKEEVHYADGIIVKRENIEYSKDTGEIAWNKEKDFATIKKVLSYPQVNIVKKTEIQTHGLDRGKPKGLFNSNPSPKPSEDSKENLVPIKQGLDPRKYGGYAGISNSYAVLVKAIVEKGAKKQQKTILEFQGISILDKINFENNKENYLLKKRYIEILSTITLPKYSLFEFPDGTRRRLASILSTNNKRGEIHKGNELVLPGKYTTLLYHAKNINKKLEPEHLEYVEKHRNDFAKLLECVLNFNDKYVGALKNGERIRQAFTDWETVDIEKLCFSFIGPENSKNAGLFELTSQGSASDFEFLGVKIPRYRDYAPSSLLKATLIHQSITGLYETRIDLSKLGED

SEQ ID NO: 746 - protein, 1377 aa, Streptococcus sanguinis
MKKPYSIGLDIGTNSVGWAVITDDYKVPSKKMKVLGNTDKHFIKKNLIGALLFDEGTTAEDRRLKRTSRRRYTRRKNRLRYLQEIFSEEISKLDSSFFHRLDDSFLVPEDKRGSKYPIFATLEEEKEYHKKFPTIYHLRKHLADSKEKTDLRLIYLALAHMIKYRGHFLYEESFDIKNNDIQKIFNEFISIYDNTFEGSSLSGQNAQVEAIFTDKISKSTKRERVLKLFSDEKSTGLFSEFLKLIVGNQADFKKHFDLEEKAPLQFSKDTYDEDLENLLGQIGDGFADLFLVAKKLYDAILLSGILTVTDPSTKAPLSASMIERYENHQEDLAALKQFIKNNLSEKYAEVFSDQSKDGYAGFIDGKTTQEAFYKYIKNLLSKLEGADYFLNKIEREDFLRKQRTFDNGSIPHQIHLQEMNAILRRQGEHYLFLKENREKIEKILAFRIPYYVGPLARGNRDFAWLTRNSDQAIRPWNFEEVVDKASSAEDFINKMTNYDLYLPEEKVLPKHSLLYETFAVYNELTKVKFIAEGLRDYQFLDSGQKKQIVNQLFKDKRKVTEKDIIHYLHNVDGYDGIELKGIEKQFNASLSTYHDLLKIIKDKEFMDNPKNGEILENIIHTLTIFEDREMIKQRLAQYDTLFDEKVIKALTRRHYTGWGKLSAKLINGIRDKQTGKTILEYLIDDGDCNRNFMQLINDDGLSFKEIIQKAQVVGKTDDVKQVVQEIPGSPAIKKGILQSIKIVDELVKVMGHNPESIVIEMARENQTTAKGKKNSQQRYKRIEDALKNLAPGLDSNILKENPTDNIQLQNDRLFLYYLQNGKDMYTGKAIDINQLSNYDIDHIIPQAFIKDDSLDNRVLTSSKDNRGKSDNVPSIEVVQKRKAFWQQLLDSKLISERKFNNLTKAKRGGLDERDKVGFIKRQLVETRQITKHVAQLLDTRFNTEVNEENQKIRTVKIITLKSNLVSNFRKEFGLYKVREINDYHHAHDAYLNAVVAKAILKKYPKLEPEFVYGDYQKYDLKRYILKSKASNTIDKATEKYFFYSNLLNFFKEKVRYADGTIKKRENIEYSNDTGEIAWNKEKDFATIKKVLSLPQVNIVKKTEEQTVGQNGGLFDNNIVSKKKVVDASKLIPIKSSLSPEKYGGYARPTIAYSVLVIADIEKGKGKAKKLKRIKEIVGITIQDKKKFESNPVTYLEECGYKNINSNLIIKLPKYSLFEFNDGQRRLLASSIELQKGNELILPYHLTALLYHAQRINKISEPIHKQYVEAHQNEFKELLTTIISLSKKYIQKPNVELLLQQAFDQADKDIYQLSESFISLLKLTSFGAPGAFKFLGVEISQSSVRYKPNSQFLDTTLIHQSITGLYETRIDLSKLGED

SEQ ID NO: 747 - protein, 1370 aa, Streptococcus sanguinis
MKKPYSIGLDIGTNSVGWAVVTDDYKVPAKKMRVFGDTDRSHIKKNLLGTLLFDDGNTAESRRLKRTARRRYTRRRNRILYLQEIFTESMNEIDESFFHRLDDSFLVPEDKRGSKYPIFATLQEEKEYHKQFPTIYHLRKQLADSKEKSDVRLIYLALAHMIKYRGHFLYEETFDIKNNDIQKIFNEFINIYDNTFEGSSLSGQNAQVEAIFTDKISKSAKRERVLKLFPDEKSTGLFSEFLKLIVGNQADFKKHFDLEEKAPLQFSKDTYDEELENLLGQIGDDFADLFLIAKKLYDAILLSGILTVTDPSTKAPLSASMIERYENHQKDLAALKQFIKNNLPEKYVEVFSDQSKDGYAGYIDGKTTQEAFYKYIKNLLSKFEGADYFLDKIEREDFLRKQRTFDNGSIPHQIHLQEMNAILRRQGEHYPFLKENREKIEKILTFRIPYYVGPLARDNRDFSWLTRNSDEPIRPWNFEEVVDKARSAEDFIHRMTNYDLYLPEEKVLPKHSLLYETFAVYNELTKVKFIAEGLRDYQFLDSGQKKQIVNQLFKEKRKVTEKDIIHYLHNVDGYDGIELKGIEKQFNANLSTYHDLLKITKDKEFMDDPKNEEILENIVHTLTIFEDREMIKQRLAQYDTLFDEKVIKALTRRHYTGWGKLSAKLINGIRDKQSGKTILDYLIDDDKINRNFMQLINDDGLSFKEIIQKAQVVGKTDDVKQVVQELPGSPAIKKGILQSIKIVDELVKVMGYALESIVIEMARENQTTARGKKNSQQRYKRIEDALKNLAPGLDSNILKENPTDNIQLKNDRLFLYYLQNGKDMYTGKPLDINQLSSYDIDHIIPQAFIKDDSIDNRVLTSSKDNRGKSDNVPSLEVVQKRKAFWQQLLDSKLISERKFNNLTKAERGGLDERDKVGFIRRQLVETQQITKNVAQILDARFNTEVKEKNQKIRTVKIITLKSNLVSNFRKEFGLYKVREINNYHHAHDAYLNAVVAKAILKKYPKLEPEFVYGDYQKYDLKKYISRFKPSKEIEKATEKYFFYSNLLNFFKEEVLYADGTIRKRENIEYSKDTGEIAWDKEKDFATIKKVLSYPQVNIVKKREVQTGGFSKESILPKGNSDKLIPRKTKDILWDTTKYGGFDSPVIAYSILLIADIEKGKAKKLKTVKTLVGITIMEKAAFEENPITFLENKGYHNVRKENILCLPKYSLFELENGRRRLLASAKELQKGNEIVLPVCLTTLLYHSKNLHKLDEPEHLEYIQKHRNEFKDLLNLVSEFSQKYILAEANLEKIKDLYADNEQADIEILANSFINLLTFTALGAPAAFKFFGKDVDRKRYTTVSEILNATLIHQSITGLYETRIDLSKLGEE

SEQ ID NO: 748 - protein, 1421 aa, Streptococcus sanguinis
MTKFNKNYSIGLDIGVSSVGYAVVTEDYRVPAFKFKVLGNTEKEKIKKNLIGSTTFVSAQPAKGTRVFRVNRRRIDRRNHRITYLRDIFQKEIEKVDKNFYRRLDESFRVLGDKSEDLQIKQPFFGDKELETAYHKKYPTIYHLRKHLADADKNSPVADIREVYMAISHILKYRGHFLTLDKINPNNINMQNSWIDFIESCQEVFDLEISDESKNIADIFKSSENRQEKVKKILPYFQQELLKKDKSIFKQLLQLLFGLKTKFKDCFELEEEPDLNFSKENYDENLENFLGSLEEDFSDVFAKLKVLRDTILLSGMLTYTGATHARFSATMVERYEEHRKDLQRFKFFIKQNLSEQDYLDIFGRKTQNGFDVDKETKGYVGYITNKMVLTNPQKQKTIQQNFYDYISGKITGIEGAEYFLNKISDGTFLRKLRTSDNGAIPNQIHAYELEKIIERQGKDYPFLLENKDKLLSILTFKIPYYVGPLAKGSNSRFAWIKRATSSDILDDNDEDTRNGKIRPWNYQKLINMDETRDAFITNLIGNDIILLNEKVLPKRSLIYEEVMLQNELTRVKYKDKYGKAHFFDSELRQNIINGLFKNNSKRVNAKSLIKYLSDNHKDLNAIEIVSGVEKGKSFNSTLKTYNDLKTIFSEELLDSEIYQKELEEIIKVITVFDDKKSIKNYLTKFFGHLEILDEEKINQLSKLRYSGWGRYSAKLLLDIRDEDTGFNLLQFLRNDEENRNLTKLISDNTLSFEPKIKDIQSKSTIEDDIFDEIKKLAGSPAIKRGILNSIKIVDELVQIIGYPPHNIVIEMARENMTTEEGQKKAKTRKTKLESALKNIENSLLENGKVPHSDEQLQSEKLYLYYLQNGKDMYTLDKTGSPAPLYLDQLDQYEVDHIIPYSFLPIDSIDNKVLTHRENNQQKLNNIPDKETVANMKPFWEKLYNAKLISQTKYQRLTTSERTPDGVLTESMKAGFIERQLVETRQIIKHVARILDNRFSDTKIITLKSQLITNFRNTFHIAKIRELNDYHHAHDAYLAVVVGQTLLKVYPKLAPELIYGHHAHFNRHEENKATLRKHLYSNIMRFFNNPDSKVSKDIWDCNRDLPIIKDVIYNSQINFVKRTMIKKGAFYNQNPVGKFNKQLAANNRYPLKTKALCLDTSIYGGYGPMNSALSIIIIAERFNEKKGKIETVKEFHDIFIIDYEKFNNNPFQFLNDTSENGFLKKNNINRVLGFYRIPKYSLMQKIDGTRMLFESKSNLHKATQFKLTKTQNELFFHMKRLLTKSNLMDLKSKSAIKESQNFILKHKEEFDNISNQLSAFSQKMLGNTTSLKNLIKGYNERKIKEIDIRDETIKYFYDNFIKMFSFVKSGAPKDINDFFDNKCTVARMRPKPDKKLLNATLIHQSITGLYETRIDLSKLGED

SEQ ID NO: 749 - protein, 317 aa, Streptococcus sp.
FEDSILFSYQVDSKFNRKISDATIYATRKAKLDKEKSEETYVLGKIKDIYSQAGYDAFIKIYNKDKSKFLMYHKDPQTFEKVIEEILRTYPSKELNDKNKEIPCNPFEKYRQENGPIRKYSKKSNGPEIKSLKYYDNKLGNHIDITPESSDNQVVLQSLKPWRTDVYFNHQTKKYELMGLKYSDLSFEKGSGKYSISNQKYNSIKRIEGIDEQSEFKFTLYKNDLILIKDSENNEQKLFRFNSRNDTAKHYIELKPYDKAKFDGEQELITILGNVAKGGRCLKGLNKSNISIFKVKTDVLGKKHIIKKEGDEPKLKF

SEQ ID NO: 750 - protein, 1420 aa, Streptococcus sp.
MAKFNKNYSIGLDIGVSSVGYAVVTEDYRVPAFKFKVLGNTEKEKIKKNLIGSTTFVPAQSAQGTRVFRVNRRRIDRRNHRIAYLRDIFQKEIEKIDKNFYRRLDESFRVLGDKSEDIQIKQPFFGNKELETAYHKKYPTIYHLRKHLADADKNSPVADIREVYMVLSHILKYRGHFLTLGKIDPNNINMQNSWIDFIESCQDAFDLEISDESKTIAAIFKSSENRQEKVKQILSYFQQELLKKDKSIFKQLLQLLFGLKTKFKDCFELEEEPDLNFSKENYDENLENLLGALEEDFSDVFAKLKILRDTILLSSMLTYTGATHARFSATMVERYEEHRKDLQRFKSFVKQNLSEQDYLDIFGRKTPTGFDVDKETKGYVGYISNKMVLTNPQKQKTIQQNFYDYISGKITGIEGAECFLNKISDGTFLRKLRTTDNGAIPNQIHAYELEKIIERQGRDYPFLLENKDKLLSILTFKIPYYVGPLAKGNNSRFAWIKRTTSQDVLDDNDEDTRNGKIRPWNYHKLINMDETRDAFIINLIGNDIILLNEKVLPKRSLIYEEVMLQNELTRVKYKDKYGKIHFFNSELRQEIINNLFKTNSKRVSSAMLLSYLENFTNLQAVEIVSGIEKGKSLNSTLKTYNDLKTIFSEELLDSEIYQKELEEIIKVITVFDDKKSIKNYLTKYFGHLEFLNEEKINQLSKLRYTGWGRYSGKLLLGIRDEDTGFNLMQFLRNDDENRNLTQLISDTTLSFDSAIKAIQSKSTVEDDVFEEIKNLAGSPAIKRGILNSIKIVDELVQIIGYPPQNIIIEMARENMTTEEGQKKAKTRKSKLESALKNIEDSVLESGKVPHSDEQLQSEKLYLYYLQNGKDMYSLDKTGSPTPLYRDQLDQYEVDHIIPYSFLPIDSIDNKVLTHRENNQRKLNNIPDKETVANMKPFWEKLYNAKLISQTKYQRLTTSERTPDGVLTESMKAGFIERQLVETRQIIKHVARILDNRFSDTKIITLKSQLVTNFRNTFHIAKIRELNDYHHAHDAYLAVVVGQTLLKAYPKLAPELIYGHHAHFNRHEENKATLRKHLYSNIMRFFNNPDSKVSKDIWDCNRDLPIVKDVIYNSQINFVKRTMIKKGAFYNQNPVGKLNKQIAANNRYPLKTKVSSLDTSIYGGYGPMNSALSIIIIAERFNEKKGKIETVKEFHDIFIIDYEKFNNNPFQFLNNVSEEGFLKKNDLNRVLAFYRISKYSLMQKIDGTRMLFESKSNLHKVTQFKLTKTQNELFFHMKRLLTKSNLMDLKSESAIKESQNFIQTHQNEFDNIADRLSNYSQKMLGETKSLQTLINGYNERPIKQIDNNEETIRYYYDNFIKMFSFVKSGAPKDIINFFNDKYTVPRMRPKPDRKMLDATLIHQSITGLYETRIDLSKLGED

SEQ ID NO: 751 - protein, 1371 aa, Streptococcus sp.
MENKNYSIGLDIGTNSVGWSVITDDYKVPSKKMKVLGNTDKHFIKKNLIGALLFDEGTTAEARRLKRTARRRYTRRKNRLRYLQEIFSEEIGKVDSSFFHRLDDSFLIPEDKRGSKYPIFATLAEEKKYHKQFPTIYHLRKQLADSKEKTDLRLIYLALAHMIKYRGHFLYEEAFDIKNNDIQKIFNEFISIYNNTFEGNSLSGQNVQVEAIFTDKISKSAKRERVLKLFPDEKSTGLFSEFLKLIVGNQADFKKHFDLEEKAPLQFSRDTYDEDLENLLGQIGDDFADLFLVAKKLYDAILLSGILTVTNPSTKAPLSASMIERYENHQKDLASLKQFIKNNLPEKYDEVFSDQSEDGYAGYIDGKTTQETFYKYIKNLLSKFEGADYFLDKIEREDFLRKQRTFDNGSIPHQIHLQEMNAILRRQGEHYPFLKENKEKIEKILTFRIPYYVGPLARGNRDFAWLTRNSDQAIRPWNFEEIVDKASSAEDFINKMTNYDLYLPEEKVLPKHSLLYETFAVYNELTKVKFIAEGLRDYQFLDSGQKKQIVTQLFKEKRKVTEKDIIQFLHNVDGYDGIELKGIEKQFNASLSTYHDLLKIIKDKAFMDDAKNEAILENIVHTLTIFEDREMIKQRLAQYDSLFDEKVIKALTRRHYTGWGKLSAKLINGISDKQTGNTILDYLIDDGEINRNFMQLINDDGLSFKEIIQKAQVVGKTNDVKQVVQELPGSPAIKKGILQSIKIVDELVKVMGHAPESIVIEMARENQTTARGKKNSQQRYKRIEDSLKILASGLNSKILKEHPTDNIQLQNDRLFLYYLQNGKDMYTGEALDINQLSSCDIDHIIPQAFIKDDSLDNRVLTSSKDNRGKSDNVPSLEVVDKMKVFWQQLLDSKLISYRKFNNLTKAERGGLNELDKVGFIKRQLVETRQITKHVAQILDARFNKEVTEKDKKNRTVKIITLKSNLVSNFRKEFELYKVREINDYHHAHDAYLNAVVAKAILKKYPKLEPEFVYGDYQKYDLKRYISRSKDPKEIEKATEKYFFYSNLLNFFKEEVHYADGTIVKRENIEYSKDTGEIAWNKEKDFATIKKVLSLPQVNIVKKREVQTGGFSKESILPKGNSDKLIPRKTKDILWDTTKYGGFDSPVIAYSILLIADIEKGKAKKLKTVKTLVGITIMEKDAFEKNPIAFLENKGYHNVCKENILCLPKYSLFELENGRRRLLASAKELQKCNEIVLPVYLTTLLYHSKNVHKLDEPGHLEYIQKHRNEFKDLLNLVSEFSQKYVLADANLEKIKNLYADNEQADIEILANSFINLLTFTALGAPAAFKFFGKDVDRKRYTTVSEILNATLIHQSITGLYETRIDLSKLGED

SEQ ID NO: 752 - protein, 93 aa, Streptococcus sp.
MILIKDSENNEQKLFRFNSRNDTAKHYVELKPYDKARFDGQQELITILGNVAKGGQCLKGLNKSNISIFKVKTDVLGKKHIIKKEGDEPKLKF

SEQ ID NO: 753 - protein, 1121 aa, Streptococcus sp.
MNGLVLGLDIGIASVGVGILEKNSGKIIHANSRLFPAATADNNVERRKNRQARRLHRRKKHRGVRFQDLFEDYGLLTDFSKVSINLNPYRLRVDGLNQQLTNEELFIALKNIVKRRGISYLDDASEDGGTVSSDYGKAVEENRKLLAEQTPGQIQLERFEKYGQVRGDFTVVENGEKRRLINVFSTSAYRKEAERILRKQQEFNSKITDEFIEDCLKILTGKRKYYHGPGNEKSRTDYGRFRTDGTTLDNIFGILIGKCTFYPDEYRASKASYTAQEFNLLNDLNNLTVPTETKKLSEEQKKVIVEYAKEAKTLGASTLLKYIAKMIDASVDQIRGYRVDVNNKPEIHTFEAYRKMQSLETISVGELSRNVLDELAHILTLNTEREGIEEAINTKLKDSFSQDQVLELVQFRKNNSSLFSKGWHNFSLKLMMELIPELYETSEEQMTILTRLGKQKSKEISKRTKYIDEKELTEEIYNPVVAKSVRQAIKIINEATKKHGIFDNIVIEMARENNEEDAKKDYIKRQKANQDEKNAAMEKAAFQYNGKKELPDSIFHGQKELATKIRLWHQQGEKCLYTGKNIPISDLIHNQYKYEIDHILPLSLSFDDSLSNKVLVLATANQEKGQRTPFQALDSMDDAWSYREFKSYVKESKLLGNKKKEYLLTEEDISKIEVKQKFIERNLIDTRYSSRVVLNALQDFYKAHKFDTTISVVRGQFTSQLRRKWGLEKSRETYHHHAVDALIIAASSQLRLWKKQNNPLIAYKEGQFVDSETGEIISLSDDEYKELVFKAPYDHFVDTLSSKTFEDSILFSYQVDSKFNRKISDATIYATRKAKLDKEKSEETYVLGKIKDIYSQAGYDAFIKIYNKDKSKFLMYHKDPQTFEKVIEEILRTYPSKELNDKNKEIPCNPFEKYRQENGPIRKYSKKSNGPEIKSLKYYDNKLGNHIDITPESSDNQVVLQSLKPWRTDVYFNHQTKKYELMGLKYSDLSFEKGSGKYSISNQKYNSIKRIEGIDEQSEFKFTLYKNDLILIKDSENNEQKLFRFNSRNDTAKHYIELKPYDKAKFDGEQELITILGNVAKGGRCLKGLNKSNISIFKVKTDVLGKKHIIKKEGDEPKLKF

SEQ ID NO: 754 - protein, 1026 aa, Streptococcus sp.
MNGLVLGLDIGIASVGVGILEKNSGKIIHANSRLFPAATADNNVERRKNRQARRLNRRKKHRGVRFQDLFEDYGLLTDFSKVSINLNPYRLRVDGLNQQLTNEELFIALKNIVKRRGISYLDDASEDGGAVSSDYGKAVEENRKLLAEQTPGQIQLERFEKYGQVRGDFTVVENGEKRRLINVFSTSAYRKEAEKILRKQQEFNNQITDEFIEDYLKILTGKRKYYHGPGNEKSRTDYGRFRTDGTTLDNIFGVLIGKCTFYPNEYRASKSSYTAQEFNLLNDLNNLTVPTETKKLSEEQKKVIVEYAKEAKTLGASTLLKYIVKMIDASVDQISGYRVDVNNKPEMHTFEVYRKMQSLETISVGELSRNVLDELAHILTLNTEREGIEEAINSKLMGVFSQDQVLELVQFRKNNSSLFSKGWHNFSLKLMMELIPELYETSEEQMTILTRLGKQKSKETSKRTKYIDEKELTEEIYNPVVAKSVRQAIKIINEATKKHGIFDNIVIEMARENNEEDAKKDYIKRQKANQDEKNAAMEKAAFQYNGKKELPGNIFNGHKELATKIRLWHQQGEKCLYTGKTIPISDLIHNQYKYEIDHILPLSLSFDDSLSNKVLVHATANQEKGQRTPFQALDSMDDAWSYREFKSYVKDLKSLSNKKKDYLLTEEDISKIEVKQKFIERNLVDTRYSSRVVLNALQDFYKSHQFDTTISVVRGQFTSQLRRKWGLEKSRETYHHHAVDALIIAASSQLRLWKKQNNPLITYKEGQFIDSQTGEIISLTDDEYKELVFKAPYDHFVDTLHSKTFEDGILFSYQVDSKYNRKISDATIYATRKAKLDKDKSEETYVLGKIKDIYSQAGYDAFIKIYNKDKRKFLMYHKDPQTFEKVIEEILRTYPSKERNDKNKEVPCNPFEKYRQENGPIRKYSKKGNGPEIKCLKYYDNKLGNYIDISPDGSDNQVVLQSLKPWRTDVYFNHQTKKYELMGLKYSDLSFEKGSGKYSISNEKYNSIKRIEGVNEQSEFKFTLYK

SEQ ID NO: 755 - protein, 1377 aa, Streptococcus sp.
MNNKPYSIGLDIGTNSVGWSVITDDYKVPSKKMKVLGNTDKRFIKKNLIGALLFDEGTTAEARRLKRTARRRYTRRKNRLRYLQEIFAEEMSKVDSSFFHRLDDSFLIPEDKRGSKYPIFATLVEEKEYHKQFPTIYHLRKQLADSKEKADLRLIYLVLAHMIKYRGHFLYEEAFDIKNNDIQKIFNEFISIYDNTFEGSSLSGQNAQVETIFTDKISKSAKRERVLKLFPDEKSTGLFSEFLKLIVGNQADFKKHFDLEEKAPLQFSKDTYDEDLENLLEQIGDDFADLFVAAKKLYDAILLSGILTVTDPSTKAPLSASMIERYENHQKDLAVLKQFIKTNLPEKYVEVFSDQSKDGYAGYIDGKTTQEAFYKYIKNLLSKFDGADYFLDKIEREVFLRKQRTFDNGSIPHQIHLQEMNTILRRQGEHYPFLKENKEKIEKILTFRIPYHVGPLARGNRDFAWLTRNSDQAIRPWNFEEIVDKASSAEDFINKMTNYDLYLPEEKVLPKHSLLYETFAVYNELTKVKFIAEGMRDYQFLDSGQKKKIINQLFKKKRKVTEDDIIDCLQKIDNYDGIELKGIEKQFNASLSTYHDILKIIRDKEFMDDPKNGDILENVIHTLTIFEDREMIKQRLAQYNSIFDEKVIKALSRKHYTGWGKLSAKLIDGIRDKQTGKTILDYLMDDGKSNRNFMQLIKDDELSFTEIIQKAQVVGDTDNLRQVVQNLPGSPAIKKGILQSIKIVDELVKVMGHAPESIVIEMARENQTTARGKKNSQQRYKRIEDSLKNLASGLDSNILKENPTDNIQLQNDRLFLYYLQNGKDMYTGEALNINQLSSYDIDHIIPQAFIKDDSLDNRVLTSSKDNRGKSDNVPSLEVVEKMKAFWQQLLDSKLISERKYNNLTKAERERGGLNELDKVGFIKRQLVETRQITKHVAQILDARFNKEVTEKNKKNRNVKIITLKSNMVSNFRKEFGLYKVREINDYHHAHDAYLNAVVAKAILKKYPKLEPEFVYGDYQKYDLKRYISRSKDPKEVEKATEKYFFYSNLLNFFKEEVHYADGTIVKRENIEYSKDTGEIAWNKEKDFATIKKVLSLPQVNIVKKTEEQTVGQNGGLFDNNIVSKKKVVDASKLIPIKSGLSPEKYGGYARPTIAYSVLVTYKQNNKIKNTMVGIPVLTKLEFERDPNLYLRNLGINNVSHVIKLVKYTVLEFKHKYGTYRRFIVSNQELKRANQIFVTTKQMKLISQYTTLDKNEHDSLLKNNQQLIQSIWNQFLEFMLATDLVNKKQYDELILTNNQTIEECRNIMNRVITTLSFTNINAGQKKIIFDDTLSLPIKRWQFTDSDKMVKKIIESTLIHQSITGLYETRIDLSKLGED

SEQ ID NO: 756 - protein, 1371 aa, Streptococcus sp.
MNNNNYSIGLDIGTNSVGWAVITDDYKVPSKKMRVLGNTDKRFIKKNLIGALLFDEGTTAEDRRLKRTARRRYTRRKNRLRYLQEIFAEEMSKVDSSFFHRLDDSFLVPEDKSGSKYPIFATLAEEKEYHKKFPTIYHLRKHLADSKEKADLRLIYLALAHITKYRGHFLYEEAFDIKNNDIQKIFNEFINIYDNTFEGSSLSGQNAQVEAIFTGKISKSVKREHVLKLFPDEKSTGLFSEFLKLIVGNQADFKKHFDLEEKASLQFSKDTYDEDLENLLGQIGDDFADLFLVAKKLYDAILLSGILTVTDPSTKAPLSASMIERYENHQEDLAALKQFIKNNLPEKYAEVFSDQSKDGYAGYIDGKTTQEAFYKYIKNLLSKFEGADYFLDKIEREDFLRKQRTFDNGSIPHQIHLQEMNAILRRQGEHYPLLKENKEKIEKILTFRIPYYVGPLARGNRDFAWLTRNSDQAIRPWNFEEIVDKASSAESFINKMTNYDLYLPEEKVLPKHSLLYETFAVYNELTKVKFIAEGLRDYQFFDSGQKKQIVNQLFKEKRKVTEKDIIHYLHNVDGYDGIELKGIEKQFNASLSTYHDLLKIIKDKEFMDNHKNQEILENIVHTLTIFEDREMIKQRLAQYDSIFDEKVIKALTRRHYTGWGKLSAKLINGICDKKTGKTILDYLIDDGYNNRNFMQLINDDGLSFKEIIQKAQVVGKTDDLTQVVRELSGSPAIKKGILQSIKIVDELVKIMGYAPESIVIEMARENQTTAKGKKNSQQRYKRIEDALKNLAPGLDSTISKENPTDNIQLQNDRLFLYYLQNGKDMYTGEALDINQLSSYDIDHIIPQAFIKDDSLDNRVLTSSKDNRGKSDNVPSLEVVKKRKAFWQQLLDSKLISERKFNNLTKAERGGLDERDKVGFIKRQLVETRQITKHVARILDARFNTEVSEKNQKIRSVKIITLKSNLVSNFRKEFKLYKVREINDYHHAHDAYLNAVVAKAILKKYPKLEPEFVYGDYQKYDLKRYISKSKDPKEVEKATEKYFFYSNLLNFFKEEVHYADGTIVKRENIEYSKDTGEIAWNKEKDFVTIKKVLSYPQVNIVKKREVQTGGFSKESILPKGNSDKLIPRKTKDILWDTTKYGGFDSPVIAYSILLIADIEKGKAKKLKTVKTLVGITIMEKAAFEKNPITFLENKGYHNVRKENILCLPKYSLFELENGRRRLLASAKELQKGNEIVLPVYLTTLLYHSKNVHKLDEPEHLEYIQKHRYEFKDLLNLVSEFSQKYVLAEANLEKIKSLYVDNEQADIEILANSFINLLTFTALGAPAAFKFFGKDVDRKRYTTVSEILNATLIHQSITGLYETRIDLSKLGED

SEQ ID NO: 757 - protein, 1139 aa, Streptococcus sp.
MSDLVLGLDIGIGSVGVGILNKVTGEIIHKNSRIFPAAQAENNLERRTNRQGRRLTRRKKHRRVRLNHLFEESGLITDFTKVSINLNPYQLRVKGLTAELSNEELFIALKNMVKHRGISYLDDASDDGNSSVGDYAQIVKENSKQLETKTPGQIQLERYQKYGQLRGDFTVEEDGRKHRLINVFPTSAYHAEALRILQTQQEFNPQITDEFINSYLEILTGKRKYYHGPGNEKSRTDYGKYTTKKDAQGQYITLNNIFGILIGKCTFYPEEYRAAKASYTAQEFNLLNDLNNLTVPTETKKLSEEQKYQIITYVKNEKAMGPAKLFKYIAKLLSCDVADIKGYRIDKSDKAEIHTFEAYRKMKTLETLDVKKMAREELDKLAYVLTLNTEREGIQEALDHEFADGTFSQEQVDELVQFRKANSSIFGKGWHSFSVKLMMELIPELYATSEEQMTILTRLGKQKTTSSSNKTKYIDEKQLTEEIYNPVVAKSVRQAIKIVNAAIKKYGDFDNIVIEMARETNEDDEKKAIQKIQKANKAEKDAAMRKAANQYNGKAELPHSVFHGHKQLATKIRLWHQQGERCLYTGKTISIHDLINNPNQFEIDHILPLSITFDDSLANKVLVYATANQEKGQRTPYQALDSMDDAWSFRELKAFVRESKALSNKKKEYLLTEEDISKFDVRKKFIERNLVDTRYASRVVLNALQEHFRTHKIDTKVSVVRGQFTSQLRRHWGIEKTRDTYHHHAVDALIIAASSQLNLWKKQKNTLVSYSEDQLLDIETGELISDDEYKESVFKAPYQHFVDTLKSKEFEDSILFSYQVDSKFNRKISDATIYATRKAKLDKEKKEYTYTLGKIKDIYALGTKTPSKTGFYKFLDLYKKDKSQFLMYQKDRRTWDEVIEKILEQYRPFKEKDKNGKEVDFNPFEKYRIENGPIRKYSRKGNGPEIKSLKYYDNLLGRFVDITPSESKNPVALLSLNPWRTDVYYNTETRKYEFLGLKYADLCFEKGGSYGISKVKYNKIREKEGIGKNSEFKFTLYKNDLILIKDTETNRQQIFRFWSRTGKDNPKSFEKHKLELKPYEKTRFEKGEELKVLGKVPPSSNRLQKNMQIENLSIYKVRTDVLGNQHIIKNEGDKPKLDF

SEQ ID NO: 758 - protein, 1375 aa, Streptococcus sp.
MSNKSYSIGLDIGTNSVGWAVITDDYKVPSKKMKVLGNTDKHFIKKNLIGALLFDEGTTAEDRRLKRTARRRYTRRKNRLRYLQEIFSQEISKVDSSFFHRLDDFFLVPEDKRGSKYPIFATLVEEKEYHKKFPTIYHLRKHLADSKEKTDLRLIYLALAHMIKYRGHFLYEESFDIKNNDIQKIFSEFISIYDNTFEGKSLSGQNAQVEAIFTDKISKSTKRERVLKLFPDEKSTGLFSEFLKLIVGNQADFKKHFDLEEKAPLQFSKDTYDEDLENLLGQIGDDFADLFLVAKKLYDAILLSGILTVKDLSTKAPLSASMIERYENHQKDLAALKQFIQNNLQEKYDEVFSDQSKDGYAGYIDGKTTQEAFYKYIKNLLSKFEGADYFLDKIEREDFLKKQRTFDNGSIPHQIHLQEMNAIIRRQGEHYPFLQENKEKIEKILTFRIPYYVGPLARGNGDFAWLTRNSDQAIRPWNFEEIVDQASSAEDFINKMTNYDLYLPEEKVLPKHSLLYETFAVYNELTKVKFIAEGLTRYQFLDKKQKKDIFDTFFKAENKRKVTEKDIIHYLHNVDGYDGIELKGIEKQFNASLSTYHDLLKIIKDKAFMDDSKNEEILENIIHTLTIFEDREMIKQRLAQYDSLFDEKVIKALTRRHYTGWGKLSAKLINGIRDKKSGKTILDYLIDDGEINRNFMQLIHDDGLSFKEIIQKAQVFGKTNDVKQVVQELPGSPAIKKGILQSIKIVDELVKVMGHAPESIVIEMARENQTTARGKKNSQQRYKRIEDSLKNLASGLDSNILKENPTDNIQLQNDRLFLYYLQNGRDMYTGKPLEINQLSNYDIDHIIPQAFIKDDSLDNRVLTSSKDNRGKSDNVPSLEVVEKMKAFWQQLLDSKLISERKFNNLTKAERERGGLNELDKVGFIKRQLVETRQITKHVAQFLDARFNKEVTEKDKKNRNVKIITLKSNLVSNFRKEFGLYKVREINDYHHAHDAYLNAVLAKAILKKYPKLEPEFVYGDYQKYDLQRYISKSREPKEVEKATQKYFFYSNLLNFFKEEVHYADGTIVKRENIEYSKDTGEIAWNKEKDFATVKKVLSLPQVNIVKKTEVQTGGFSKESILPKGNSDKLIPRKTKEILWDTTKYGGFDSPVIAYSILLIADIEKGKAKKLKTVKTLVGITIMEKATFEKNPITFLENKGYHNVRKENILCLPKYSLFELESGRRRMLASAKELQKGNEIVLPVYLTTLLYHSKNVHKLDEPEHLEYIQKHRYEFKDLLNLVSEFSQKYVLADANLEKIKNLYADNEQADIEILANSFINLLTFTALGAPAAFKFLGKDVDRKRYTTVSEILNATLIHQSITGLYETRIDLSKLGED

SEQ ID NO: 759 - protein, 206 aa, Streptococcus sp.
RTPFQALDSMDDAWSYREFKSYVKESKLLGNKKKEYLLTEEDISKIEVKQKFIERNLIDTRYSSRVVLNALQDFYKAHKFDTTISVVRGQFTSQLRRKWGLEKSRETYHHHAVDALIIAASSQLRLWKKQNNPLIAYKEGQFVDSETGEIISLSDDEYKELVFKAPYDHFVDTLSSKTFEDSILFSYQVDSKFNRKISDATIYATR

SEQ ID NO: 760 - protein, 1122 aa, Streptococcus suis
MSNGKILGLDIGIASVGVGVIDAQTGEIIHASSRIFPSANAANNAERRTFRGSRRLIRRKKHRIKRLDDLFNDFHINLDGEMSTDNPYVLRVKGLSQKLTVEELYISIKNIMKRRGISYLDDAESDNEAGRSDYAKAIERNRQLLTSKTPGEIQLERLEKYGQLRGNFTIIDEEGQSQQIINVFSTSDYVKEVEKILDCQKMYHKFISDEFCDKLIELLREKRKYYVGPGNEKSRTDYGIYRTDGTTLENLFGILIGKCTFYPDQYRSSRASYTAQEFNFLNDLNNLTVPTETKKLSQEQKEFLVNYAKETSVLGAGKILQQIAKLADCKVEDIRGYRLDNKDKPELHTFETYRAMKGLVPLVDIGVLSREQLDILADILTLNTDFEGIREALKKQLPNVFDEKQVKGLASFRKSKSQLFAKGWHNLSQKIMLEVIPELYATSDEQMTILTRLGKFEKSSVAEYPSSINVDEITDEIYNPVVAKSIRQTIKIINASIKKWDEFDQIVIEMPRDRNEDEEKKRIADGQKANAKEKADSILRAAELYCAGKVLPDYVYNGHNQLATKIRLWYQQGERCIYTGQPISIHDLIHNQNQYEIDHILPLSLTFDDSLSNKVLVLATANQEKAQRTPYNYLKSATSAWSYREFKDYVTKRKGIGKKKCEYLTFEEDINGFEVRSKFIQRNLVDTRYASKVILNALQDYFKISGIQTKVSVVRGQFTSQLRHKWGIEKTRETYHHHAVDALIIAASSQLRLWKKQESPLVVDYQEGRQVDLETGEILELTDEQYKELVYQPPYQGFVNTISSSAFDNEILFSYQVDSKVNRKISDATIYATRNAQLGKDKTEGIYVLGKIKDIYTQAGYEAFLKRYTKDKTSFLMYHKDLDTWEKVIEIILRDYREYDEKGKEIGNPFERYRRENGYVKKYSRKGNGTAIKSLKYYDNKLGNHIDITPENSRNAVVLQSLKPWRTDVYFNKETGKYEFLGIKYSDLSFEKGTGEYGISQEKYDSIKIAEGVAKKSIFKFTLYKQDLLFIKDIENNFGKLLRFTSKNDTSKHYVELKPYDKNKFGTEEPLLPVLGNVAKSGQCIKGLNKSNISIYKVRTDILGYRHFIKQEGEHPQLKFKK

SEQ ID NO: 761 - protein, 1381 aa, Streptococcus suis
MVKKKYAIGIDIGTNSVGWSIVTDDYKVPSKKMKVFGNTEKRYIKKNLLGTLLFDEGNTAENRRLKRTARRRYTRRRNRILYLQEIFAEEINKIDDSFFQRLDDSFLIVEDKQGSKHPIFGTLQEEKEYHKQFPTIYHLRKQLADSSQKADIRLIYLALAHIIKYRGHFLFEGDLKSENKDVQHLFNDFVEMFDKTVEGSYLSENLPNVADVLVEKVSKSRRLENILHYFPNEKKNGLFGNFLALALGLQPNFKTNFELAEDAKIQFSKETYEEDLEELLGKIGDDYADLFIATKSLYDGILLAGILSTTDSTTKAPLSSSMVNRYEEHQKDLALLKNFIHQNLSDSYKEVFNDKLKDGYAGYIEGKTTQENFYRFIKKAIEKIEGSNYFIDKIDREDFLRKQRTFDNGSIPHQIHLQEMHAIIRRQAEFYPFLVENQDKIEKILTFRIPYYVGPLARGKSEFAWLNRKSDEKIRPWNFDEMVDKETSAENFITRMTNYDRYLPDQKVLPKHSLLYEKFAVYNELTKVKFIAEGMRDYQFLDSGQKKDIVKTLFKTKRKVTAKDIKAYLENSNGYAGVELKGLEEQFNASLPTYHDLLKILRDKAFIDAEENQEILEDIVLTLTLFEDREMIRKRLEKYKDILTEEQRKKLERRHYTGWGRLSAKLINGILDKVTRKTILGYLIDDGTSNRNFMQLINDDTLSFVDEIRLAQGSGEAEDYRAEVQNLAGSPAIKKGILQSLKIVDELIEVMGYEPEHIVVEMARENQFTNQGRRNSQQRINRLENALKDFGSKILEEQKPYGVSKVNNIHLQSDRLFLYYLQNGKDMYTDEELDIDHLSEYDIDHIIPQAFIKDDSLDNKVLTKSAKNRGKSDDVPSMEIVHNRKNFWRQLLKSKLISQRKFDNLTKAERGGLTNEDKARFIQRQLVETRQITKHVARMLDTRFNTKLDEAGNRIRDPKVNIITLKSNLVSQFRKDYQLYKIREINNYHHAHDAYINAVVATALLKKYPQLAPEFVYGEYPTYNSYNSRKSATEKVLFYSNIMNFFKRIVVHSKTGEVRIRPVIEVNKETGEIVWDKKSDFRTVRKVLSYPQVNVVKKTEVQNHGLDRGKPKGFYNANLSPRPKEGSVENLVPAKQSFDTKRYGGYAGISNSYAVLVNGIIEKGKKKSKAEVTEFQGISILARKDFDKNPKQYLLNLGYKDIKSIIKLPKYSLFELENGSRRMLASILSTNNKRGEIHKGNEMYLPDKFVTLLYHAMRVNRTLEPGHKKYVETHRHVFDELLIYILEYNEKIVGAKANGKRIVEAYSARKDTDNLEELCNSFINLLNLTALGSAVDFEFLGTKIPRYRDYTPSSLLKATLIHQSVTGLYETRIDLSKLGGD

SEQ ID NO: 762 - protein, 39 aa, Streptococcus thermophilus
GRCIKGLGKSNISIYKVRTDVLGNQHIIKNEGDKPKLDF

SEQ ID NO: 763 - protein, 302 aa, Streptococcus thermophilus
MIRRKKHRIVRLNRLFEESGLITDFTKISINLNPYQLRVKGLTDELSNEELFIALKNMVKHRGISYLDDASDDGNSSVGDYAQIVKENSKQLETKTPGQIQLERYQTYGQLRGDFTVEKDGKKHRLINVFPTSAYRSEALRILQTQQEFNPQITDEFINRYLEILTGKRKYYHGPGNEKSRTDYGRYRTSGETLDNIFGILIGKCTFYPDEFRAAKASYTAQEFNLLNDLNNLTVPTETKKLSKEQKNQIINYVKNEKAMGPAKLFKYIAKLLSCDVADIKGYRIDKSGKAERFILSKPIEK

SEQ ID NO: 764 - protein, 1121 aa, Streptococcus thermophilus
MSDLVLGLDIGIGSVGVGILNKVTGEIIHKNSRIFPAAQAENNLVRRTNRQGRRLTRRKKHRIVRLNRLFEESGLITDFTKISINLNPYQLRVKGLTDELSNEELFIALKNMVKHRGISYLDDASDDGNSSVGDYAQIVKENSKQLETKTPGQIQLERYQTYGQLRGDFTVEKDGKKHRLINVFPTSAYRSEALRILQTQQEFNPQITDEFINRYLEILTGKRKYYHGPGNEKSRTDYGRYRTSGETLDNIFGILIGKCTFYPDEFRAAKASYTAQEFNLLNDLNNLTVPTETKKLSKEQKNQIINYVKNEKAMGPAKLFKYIAKLLSCDVADIKGYRIDKSGKAEIHTFEAYRKMKTLETLDIEQMDRETLDKLAYVLTLNTEREGIQEALEHEFADGSFSQKQVDELVQFRKANSSIFGKGWHNFSVKLMMELIPELYETSEEQMTILTRLGKQKTTSSSNKTKYIDEKLLTEEIYNPVVAKSVRQAIKIVNAAIKEYGDFDNIVIEMARETNEDDEKKAIQKIQKANKDEKDAAMLKAANQYNGKAELPHSVFHGHKQLATKIRLWHQQGERCLYTGKTISIHDLINNSNQFEVDHILPLSITFDDSLANKVLVYATANQEKGQRTPYQALDSMDDAWSFRELKAFVRESKTLSNKKKEYLLTEEDISKFDVRKKFIERNLVDTRYASRVVLNALQEHFRAHKIDTKVSVVRGQFTSQLRRHWGIEKTRDTYHHHAVDALIIAASSQLNLWKKQKNTLVSYSEDQLLDIETGELISDDEYKESVFKAPYQHFVDTLKSKEFEDSILFSYQVDSKFNRKISDATIYATRQAKVGKDKADETYVLGKIKDIYTQDGYDAFMKIYKKDKSKFLMYRHDPQTFEKVIEPILENYPNKQMNEKGKEVPCNPFLKYKEEHGYIRKYSKKGNGPEIKSLKYYDSKLGNHIDITPKDSNNKVVLQSVSPWRADIYFNNTTGKYEILGLKYADLQFEKGTGTYKISQEKYNDIKKKEGVDSDSEFKFTLYKNDLLLVKETETKEQQLFRFLSRTMPKQKHYVELKPYDKQKFEGGEALIKVLGNVANGGQCIKGLGKSNISIYKVRTDVLGNQHIIKNEGDKPKLDF

SEQ ID NO: 765 - protein, 1121 aa, Streptococcus thermophilus
MSDLVLGLDIGIGSVGVGILNKVTGEIIHKNSRIFPAAQAENNLVRRTNRQGRRLTRRKKHRIVRLNRLFEESGLITDFTKISINLNPYQLRVKGLTDELSNEELFIALKNMVKHRGISYLDDASDDGNSSVGDYAQIVKENSKQLETKTPGQIQLERYQTYGQLRGDFTVEKDGKKHRLINVFPTSAYRSEALRILQTQQEFNPQITDEFINRYLEILTGKRKYYHGPGNEKSRTDYGRYRTSGETLDNIFGILIGKCTFYPDEFRAAKASYTAQEFNLLNDLNNLTVPTETKKLSKEQKNQIINYVKNEKAMGPAKLFKYIAKLLSCDVADIKEYRIDKSGKAEIHTFEAYRKMKTLETLDIEQMDRETLDKLAYVLTLNTEREGIQEALEHEFADGSFSQKQVDELVQFRKANSSIFGKGWHNFSVKLMMELIPELYETSEEQMTILTRLGKQKTTSSSNKTKYIDEKLLTEEIYNPVVAKSVRQAIKIVNAAIKEYGDFDNIVIEMARETNEDDEKKAIQKIQKANKDEKDAAMLKAANQYNGKAELPHSVFHGHKQLATKIRLWHQQGERCLYTGKTISIHDLINNSNQFEVDHILPLSITFDDSLANKVLVYATANQEKGQRTPYQALDSMDDAWSFRELKAFVRESKTLSNKKKEYLLTEEDISKFDVRKKFIERNLVDTRYASRVVLNALQEHFRAHKIDTKVSVVRGQFTSQLRRHWGIEKTRDTYHHHAVDALIIAASIQLNLWKKQKNTLVSYSEDQLLDIETGELISDDEYKESVFKAPYQHFVDTLKSKEFEDSILFSYQVDSKFNRKISDATIYATRQAKVGKDKADETYVLGKIKDIYTQDGYDAFMKIYKKDKSKFLMYRHDPQTFEKVIEPILENYPNKQINEKGKEVPVNPFLKYKEEHGYIRKYSKKGNGPEIKSLKYYDSKLGNHIDITPKDSNNKVVLQSVSPWRADVYFNKTTGKYEILGLKYADLQFEKGTGTYKISQEKYNDIKKKEGVDSDSEFKFTLYKNDLLLVKDTETKEQQLFRFLSRTMPKQKHYVELKPYDKQKFEGGEALIKVLGNVANSGQCKKGLGKSNISIYKVRTDVLGNQHIIKNEGDKPKLDF

SEQ ID NO: 766 - protein, 1121 aa, Streptococcus thermophilus
MSDLVLGLDIGIGSVGVGILNKVTGEIIHKNSRIFPAAQAENNLVRRTNRQGRRLTRRKKHRRVRLNRLFEESGLITDFTKISINLNPYQLRVKGLTDELSNEELFIALKNMVKHRGISYLDDASDDGNSSVGDYAQIVKENSKQLETKTPGQIQLERYQTYGQLRGDFTVEKDGKKHRLINVFPTSAYRSEALRILQTQQEFNPQITDEFVNRYLEILTGKRKYYHGPGNEKSRTDYGRYRTNGETLDNIFGILIGKCTFYPEEFRAAKASYTAQEFNLLNDLNNLTVPTETKKLSKEQKNQIINYVKNEKAMGPAKLFKYIAKLLSCDVADIKGYRIDKSGKAEIHTFEAYRKMKTLETLDIEQMDRETLDKLAYVLTLNTEREGIQEALEHEFADGSFSQKQVDELVQFRKANSSIFGKGWHNFSVKLMMELIPELYETSEEQMTILKRLGKQKTTSSSNKTKYIDEKLLTEEIYNPVVAKSIRQAIKIVNAAIKEYGDFDNIVIEMARETNEDDEKKAIQKIQKANKDEKDAAMLKAANQYNGKAELPHSVFHGHKQLATKIRLWHQQGERCLYTGKTISIHDLINNPNQFEVDHILPLSITFDDSLANKVLVYATANQEKGQRTPYQALDSMDDAWSFRELKAFVRESKTLSNKKKEYLLTEEDISKFDVRKKFIERNLVDTRYASRVVLNALQEHFRAHKIDTKVSVVRGQFTSQLRRHWGIEKTRDTYHHHAVDALIIAASSQLNLWKKQKNTLVSYSEDQLLDIETGELISDDEYKESVFKAPYQHFVDTLKSKEFEDSILFSYQVDSKFNRKISDATIYATRQAKVGKDKKDETYVLGKIKDIYTQDGYDAFMKIYKKDKSKFLMYRHDPQTFEKVIEPILENYPNKEMNEKGKEVPCNPFLKYKEEHGYIRKYSKKGNDPEIKSLKYYDSKLGNHIDITPKDSNNKVVLQSVSPWRADVYFNKTTGKYEILGLKYADLQFEKGTGTYKISQEKYNDIKKKEGVDSDSEFKFTLYKNDLLLVKDTETKEQQLFRFLSRTMPKQKHYVELKPYDKQKFEGGEALIKVLGNVANSGQCKKGLGKSNISIYKVRTDVLGNQHIIKNEGDKPKLDF

SEQ ID NO: 767 - protein, 1122 aa, Streptococcus thermophilus
MSDLVLGLDIGIGSVGVGILNKVTGEIIHKNSRIFPAAQAENNVERRTNRQGRRLTRRKKHRRVRLNRLFEESGLITDFTKISINLNPYQLRVRGLTDELSNEELFIALKNMVKHRGISYLDDASDDGNSSVGDYAQIVKENSKQLETKTPGQIQLERYQTYGQLRGDFTVEKDGKKHRLINVFPTSAYRSEALRILQTQQEFNSQITDEFINRYLEILTGKRKYYHGPGNEKSRTDYGRYRTSGETLDNIFGILIGKCTFYPEEFRAAKASYTAQEFNLLNDLNNLTVPTETKKLSKEQKNQIINYVKNEKAMGPAKLFKYIAKLLSCDVADIKGYRIDKSGKAEIHTFEAYRKMKTLETLDIEQMDRETLDKLAYVLTLNTEREGIQEALEHEFADGSFSQKQVDELVQFRKASSSIFGKGWHNFSVKLMMELIPELYETSEEQMTILTRLGKQKTTSSSNKTKYIDEKLLTEEIYNPVVAKSVRQAIKIVNAAIKEYGDFDNIVIEMARETNEDDEKKAIQKIQKANKDEKDAAMLKAANQYNGKAELPHSVFHGHKQLATKIRLWHQQGERCLYTGKTISIHDLINNPNQFEVDHILPLSITFDDSLANKVLVYATANQEKGQRTPYQALDSMDDAWSFRELKAFVRESKTLSNKKKEYLLTEEDISKFDVRKKFIERNLVDTRYASRVVLNALQEHFRAHKIDTKVSVVRGQFTSQLRRHWGIEKTRDTYHHHAVDALIIAASSQLNLWKKQKNTLVSYSEDQLLDIETGELISDDEYKESVFKAPYQHFVDTLKSKEFEDSILFSYQVDSKFNRKLSDATIYATRQAKVGKDKKDETYVLGKIKDIYTQDGYDAFMKIYKKDKSKFLMYRHDPQTFEKVIEPILENYPNKEMNEKGKEVPCNPFLKYKEEHGYIRKYSKKGNGPEIKSLKYYDSKLLGNPIDITPENSKNKVVLQSLKPWRADVYFNKTTGKYEILGLKYADLQFEKKTGTYKISQEKYNGIMKEEGVDSDSEFKFTLYKNDLLLVKDTETKEQQLFRFLSRTMPNVKYYVELKPYSKDKFEKNESLIEILGSADKSGRCIKGLGKSNISIYKVRTDVLGNQHIIKNEGDKPKLDF

SEQ ID NO: 768 - protein, 1388 aa, Streptococcus thermophilus
MTKPYSIGLDIGTNSVGWAVITDNYKVPSKKMKVLGNTSKKYIKKNLLGVLLFDSGITAEGRRLKRTARRRYTRRRNRILYLQEIFSTEMATLDDAFFQRLDDSFLVPDDKRDSKYPIFGNLVEEKAYHDEFPTIYHLRKYLADSTKKADLRLVYLALAHMIKYRGHFLIEGEFNSKNNDIQKNFQDFLDTYNAIFESDLSLENSKQLEEIVKDKISKLEKKDRILKLFPGEKNSGIFSEFLKLIVGNQADFRKCFNLDEKASLHFSKESYDEDLETLLGYIGDDYSDVFLKAKKLYDAILLSGFLTVTDNETEAPLSSAMIKRYNEHKEDLALLKEYIRNISLKTYNEVFKDDTKNGYAGYIDGKTNQEDFYVYLKNLLAEFEGADYFLEKIDREDFLRKQRTFDNGSIPYQIHLQEMRAILDKQAKFYPFLAKNKERIEKILTFRIPYYVGPLARGNSDFAWSIRKRNEKITPWNFEDVIDKESSAEAFINRMTSFDLYLPEEKVLPKHSLLYETFNVYNELTKVRFIAESMRDYQFLDSKQKKDIVRLYFKDKRKVTDKDIIEYLHAIYGYDGIELKGIEKQFNSSLSTYHDLLNIINDKEFLDDSSNEAIIEEIIHTLTIFEDREMIKQRLSKFENIFDKSVLKKLSRRHYTGWGKLSAKLINGIRDEKSGNTILDYLIDDGISNRNFMQLIHDDALSFKKKIQKAQIIGDEDKGNIKEVVKSLPGSPAIKKGILQSIKIVDELVKVMGGRKPESIVVEMARENQYTNQGKSNSQQRLKRLEKSLKELGSKILKENIPAKLSKIDNNALQNDRLYLYYLQNGKDMYTGDDLDIDRLSNYDIDHIIPQAFLKDNSIDNKVLVSSASNRGKSDDFPSLEVVKKRKTFWYQLLKSKLISQRKFDNLTKAERGGLLPEDKAGFIQRQLVETRQITKHVARLLDEKFNNKKDENNRAVRTVKIITLKSTLVSQFRKDFELYKVCEINDFHHAHDAYLNAVIASALLKKYPKLEPEFVYGDYPKYNSFRERKSATEKVYFYSNIMNIFKKSISLADGRVIERPLIEVNEETGESVWNKESDLATVRRVLSYPQVNVVKKVEEQNHGLDRGKPKGLFNANLSSKPKPNSNENLVGAKEYLDPKKYGGYAGISNSFAVLVKGTIEKGAKKKITNVLEFQGISILDRINYRKDKLNFLLEKGYKDIELIIELPKYSLFELSDGSRRMLASILSTNNKRGEIHKGNQIFLSQKFVKLLYHAKRISNTINENHRKYVENHKKEFEELFYYILEFNENYVGAKKNGKLLNSAFQSWQNHSIDELCSSFIGPTGSERKGLFELTSRGSAADFEFLGVKIPRYRDYTPSSLLKDATLIHQSVTGLYETRIDLAKLGEG

SEQ ID NO: 769 - protein, 1388 aa, Streptococcus thermophilus
MTKPYSIGLDIGTNSVGWAVITDNYKVPSKKMKVLGNTSKKYIKKNLLGVLLFDSGITAEGRRLKRTARRRYTRRRNRILYLQEIFSTEMATLDDAFFQRLDDSFLVPDDKRDSKYPIFGNLVEEKAYHDEFPTIYHLRKYLADSTKKADLRLVYLALAHMIKYRGHFLIEGEFNSKNNDIQKNFQDFLDTYNAIFESDLSLENSKQLEEIVKDKISKLEKKDRILKLFPGEKNSGIFSEFLKLIVGNQADFRKCFNLDEKASLHFSKESYDEDLETLLGYIGDDYSDVFLKAKKLYDAILLSGFLTVTDNETEAPLSSAMIKRYNEHKEDLALLKEYIRNISLKTYNEVFKDDTKNGYAGYIDGKTNQEDFYVYLKNLLAEFEGADYFLEKIDREDFLRKQRTFDNGSIPYQIHLQEMRAILDKQAKFYPFLAKNKERIEKILTFRIPYYVGPLARGNSDFAWSIRKRNEKITPWNFEDVIDKESSAEAFINRMTSFDLYLPEEKVLPKHSLLYETFNVYNELTKVRFIAESMRDYQFLDSKQKKDIVRLYFKDKRKVTDKDIIEYLHAIYGYDGIELKGIEKQFNSSLSTYHDLLNIINDKEFLDDSSNEAIIEEIIHTLTIFEDREMIKQRLSKFENIFDKSVLKKLSRRHYTGWGKLSAKLINGIRDEKSGNTILDYLIDDGISNRNFMQLIHDDALSFKKKIQKAQIIGDEDKGNIKEVVKSLPGSPAIKKGILQSIKIVDELVKVMGGRKPESIVVEMARENQYTNQGKSNSQQRLKRLEKSLKELGSKILKENIPAKLSKIDNNALQNDRLYLYYLQNGKDMYTGDDLDIDRLSNYDIDHIIPQAFLKDNSIDNKVLVSSASNRGKSDDFPSLEVVKKRKTFWYQLLKSKLISQRKFDNLTKAERGGLLPEDKAGFIQRQLVETRQITKHVARLLDEKFNNKKDENNRAVRTVKIITLKSTLVSQFRKDFELYKVREINDFHHAHDAYLNAVIASALLKKYPKLEPEFVYGDYPKYNSFRERKSATEKVYFYSNIMNIFKKSISLADGRVIERPLIEVNEETGESVWNKESDLATVRRVLSYPQVNVVKKVEEQNHGLDRGKPKGLFNANLSSKPKPNSNENLVGAKEYLDPKKYGGYAGISNSFAVLVKGTIEKGAKKKITNVLEFQGISILDRINYRKDKLNFLLEKGYKDIELIIELPKYSLFELSDGSRRMLASILSTNNKRGEIHKGNQIFLSQKFVKLLYHAKRISNTINENHRKYVENHKKEFEELFYYILEFNENYVGAKKNGKLLNSAFQSWQNHSIDELCSSFIGPTGSERKGLFELTSRGSAADFEFLGVKIPRYRDYTPSSLLKDATLIHQSVTGLYETRIDLAKLGEG

SEQ ID NO: 770 - protein, 595 aa, Streptococcus thermophilus
MVQFRKANSSIFGKGWHNFSVKLMMELIPELYETSEEQMTILKRLGKQKTTSSSNKTKYIDEKLLTEEIYNPVVAKSVRQAIKIVNAAIKEYGDFDNIVIEMARETNEDDEKKAIQKIQKANKDEKDAAMLKAANQYNGKAELPHSVFHGHKQLATKIRLWHQQGERCLYTGKTISIHDLINNPNQFEVDHILPLSITFDDSLANKVLVYATANQEKGQRTPYQALDSMDDAWSFRELKAFVRESKTLSNKKKEYLLTEEDISKFDVRKKFIERNLVDTRYASRVVLNALQEHFRAHKIDTKVSVVRGQFTSQLRRHWGIEKTRDTYHHHAVDALIIAASSQLNLWKKQKNTLVSYSEDQFLDIETGELISDDEYKESVFKAPYQHFVDTLKSKEFEDSILFSYQVDSKFNRKISDATIYATRKAKLDKEKKEYTYTLGKIKDIYTQAGYDAFIKIYKKDKSKFLMYHHDPQTFEKVIEPILENYPNKEINEKGKEVPCNPFLKYKEEHGYIRKYSKKGNGPEIKSFKYYDNLLGRHIDITPKNSKNIVALRKLNPWRTDVYFNHETMKYEFLGLKYADISYKKSKNKAGDFLPK

SEQ ID NO: 771 - protein, 1388 aa, Streptococcus thermophilus]
MTKPYSIGLDIGTNSVGWAVITDNYKVPSKKMKVLGNTSKKYIKKNLLGVLLFDSGITAEGRRLKRTARRRYTRRRNRILYLQEIFSTEMATLDDAFFQRLDDSFLVPDDKRDSKYPIFGNLVEEKVYHDEFPTIYHLRKYLADSTKKADLRLVYLALAHMIKYRGHFLIEGEFNSKNNDIQKNFQDFLDTYNAIFESDLSLENSKQLEEIVKDKISKLEKKDRILKLFPGEKNSGIFSEFLKLIVGNQADFRKCFNLDEKASLHFSKESYDEDLETLLGYIGDDYSDVFLKAKKLYDAILLSGFLTVTDNETEAPLSSAMIKRYNEHKEDLALLKEYIRNISLKTYNEVFKDDTKNGYAGYIDGKTNQEDFYVYLKNLLAEFEGADYFLEKIDREDFLRKQRTFDNGSIPYQIHLQEMRAILDKQAKFYPFLAKNKERIEKILTFRIPYYVGPLARGNSDFAWSIRKRNEKITPWNFEDVIDKESSAEAFINRMTSFDLYLPEEKVLPKHSLLYETFNVYNELTKVRFIAESMRDYQFLDSKQKKDIVRLYFKDKRKVTDKDIIEYLHAIYGYDGIELKGIEKQFNSSLSTYHDLLNIINDKEFLDDSSNEAIIEEIIHTLTIFEDREMIKQRLSKFENIFDKSVLKKLSRRHYTGWGKLSAKLINGIRDEKSGNTILDYLIDDGISNRNFMQLIHDDALSFKKKIQKAQIIGDEDKGNIKEVVKSLPGSPAIKKGILQSIKIVDELVKVMGGRKPESIVVEMARENQYTNQGKSNSQQRLKRLEKSLKELGSKILKENIPAKLSKIDNNALQNDRLYLYYLQNGKDMYTGDDLDIDRLSNYDIDHIIPQAFLKDNSIDNKVLVSSASNRGKSDDFPSLEVVKKRKTFWYQLLKSKLISQRKFDNLTKAERGGLLPEDKAGFIQRQLVETRQITKHVARLLDEKFNNKKDENNRAVRTVKIITLKSTLVSQFRKDFELYKVREINDFHHAHDAYLNAVIASALLKKYPKLEPEFVYGDYPKYNSFRERKSATEKVYFYSNIMNIFKKSISLADGRVIERPLIEVNEETGESVWNKESDLATVRRVLSYPQVNVVKKVEEQNHGLDRGKPKGLFNANLSSKPKPNSNENLVGAKEYLDPKKYGGYAGISNSFAVLVKGTIEKGAKKKITNVLEFQGISILDRINYRKDKLNFLLEKGYKDIELIIELPKYSLFELSDGSRRMLASILSTNNKRGEIHKGNQIFLSQKFVKLLYHAKRISNTINENHRKYVENHKKEFEELFYYILEFNENYVGAKKNGKLLNSAFQSWQNHSIDELCSSFIGPTGSERKGLFELTSRGSAADFEFLGVKIPRYRDYTPSSLLKDATLIHQSVTGLYETRIDLAKLGEG

SEQ ID NO: 772 - protein, 1038 aa, Streptococcus vestibularis
MIDELSNEELFIALKNMVKHRGISYLDDASDDGNSSVGDYAQIVKENSKQLETKTPGQIQLERYQKYGQLRGDFTVEEDGKKHRLINVFPTSAYRAEALRILQTQQEFNSQITDEFINRYLEILTGKRKYYHGPGNEKSRTDYGRYRTSGETLDNIFGILIGKCTFYPEEFRAAKASYTAQEFNLLNDLNNLTVPTETKKLSEEQKNQIINYVKNEKAMGPAKLFKYIAKLLSCDIADIKGYRIDKSDKAEIHTFEAYRKMKTLETIDIEKMSREELDKLAYVLTLNTEREGIQEALEHEFVDGNFSQEQIDELVQFRKANSSIFGKGWHNFSVKLMMELIPELYATSEEQMTILTRLGKQKTTSSSNKTKYIDEKLLTEEIYNPVVAKSVRQAIKIVNAAIKEYGDFDNIVIEMARATNEDDEKKAIQKIQKANKDEKDAAMLKAANQYNGKAELPHSVFHGHKQLATKIRLWHQQGERCLYTGKTISIHDLINNPNQFEIDHILPLSITFDDSLANKVLVYATANQEKGQRTPYQALDSMDDAWSFRELKAFVRESKTLSNKKKEYLLTEEDISKFDVRKKFIERNLVDTRYASRVVLNALQEHFRAHKIDTKVSVVRGQFTSQLRRHWGIEKTRDTYHHHAVDALIIAASSQLNLWKKQKNTLVNYSENQLLDIETGELISDDEYKESVFKAPYQHFVDTLKSKEFEDSILFSYQVDSKFNRKISDATIYATRKAKLDKEKKEYTYTLGKIKDIYALGTKTPSKTGFYKFLDLYKKNKSQFLMYQKDRKTWDEVIEKILEQYRPFKEKDKNGKEVDFNPFEKYRIENGPIRKYSRKGNGPEIKSLKYYDNLLGRFVDITPSESKNPVALLSLNPWRTDVYYNTETRKYEFLGLKYADLCFEKGGSYGISKVKYNKIREKEGIGKNSEFKFTLYKNDLILIKDTETNRQQVFRFWSRTGKDNPKRFEKHKIELKPYEKARFEKGEELEVLGKVPPSSNQLQKNMQIENLSIFKVRTDVLGNQHIIKNEGDKPKLDF

SEQ ID NO: 773 - protein, 97 aa, Streptococcus vestibularis
MSDLVLGLDIGIGSVGVGILNKVTGEIIHKNSRIFPAAQAENNVERRTNRQGRRLTRRKKHRRVRLNHLFEESGLITDFTKVSINLNPYQLRVKIDR

SEQ ID NO: 774 - protein, 1084 aa, Subdoligranulum sp.
MKNTLYGIGLDIGVASVGWAVVGLNGTGEPVGLHRLGVRIFDKAEQPKTGESLAAPRRMARGMRRRLRRKALRRADVYALLERSGLSTREELAQMFEAGGLEDIYALRTRALDEPVGKAEFSRILLHLAQRRGFKSNRRTASDGEDGRLLAAVNENRRRMAQGGWRTVGEMLYRHEAFALHKRNKADDYLSTVGRDMVAEEASILFERQRAMGCSWAAPELQAEYLSILLRQRSFDEGPGGNSPYGGNQVEKMVGRCTFEPDEPRAAKAAYSFEYFSLLQKLNHIRLAENGETRPLTQPQRQQLLSLAHKTPDISLARIRKELALPETVQFNGVRCRANETLEESEKKEKFACLPAYHKMRKALDGVVKGRISSLSISQRDAAATALSLYKNEDTLRAKLTEAGFQAPEIDALAGLTGFSKFGHLSLKACRKLIPHLEQGLTYDQACTAAGYDFKGHGAGERAFTLPAAAPEMEQITSPVVRRAVAQTIKVVNGIIREMDASPAWVRIELARELSKTFGERQEMDRSMRENAAQNERLMQELRDTFHLLSPTGQDLVKYRLWKEQDGVCAYSLRRLDVERLFEPGYVDVDHIVPYSLSFDDRRSNKVLVLSSENRQKGNRLPLQYLQGKRREDFIVWTNSSVHDYRKRQNLLREKLSGDEAEGFRQRNLQDTQHMARFLYNYISDHLAFAQSEALGKKRVFAVSGAVTSHLRKRWGLSKVRADGDLHHALDAAVVACTTDGMIRRISGYYGHIEGEYLQDADGAGSQHARTKERFPAPWPRFRDELIVRLSEQPAEPLLDINPEFYCEYGTEHIRPVFVSRMPRRKVTGPGHKETIKGAAAADEGLLTVRKALTELKLDKDGEIKDYYMPSSDTLLYEALKAQLRRFGGDGKKAFAEPFYKPKADGTPGPLVRKVKTTEKATLTVPVHGGAASNDTMVRVDVFLVPGDGYYWVPVYTADTLKPELPNRAVVQGKPYSEWKEMREEDFIFSLYPNDLVYVEHKSGLKFTLQNADSTLEKTRTQTSAFAYFVSGSISTASITIRTHDNAYGIPSLGVKTLKTFHKYQVDVLGNVFPVHKETRQKFR

SEQ ID NO: 775 - protein, 951 aa, Sutterella parvirubra
MPTVRPVFHSSASFDLGAKNTGLFLVNHPAGAAPSAEYAAAYTIVQPADGDGLNYSTTNRRAVRHRLRGGKRFKLARRLVLQVIDALRKLKPGLIRDEEMRRTVEALSSLLKRRGFTRIESEAQVDPTTLDSVDPAVFADHETLGGFFSLGIPISTQWDALSQNPGAVEQLFKALPSAKDFGKYVTEQFPEFAEQKKLYADAIKVLSSEAKSIVMQLGLGHHHRSKYFEMIAHDMLRDPRLQGVFELFGSEERFKTFICNVSNLQLRALRWYFDEPNPEVANQWNPEKFQVVWLRGLKYFHPDAERKADMKKLIDELTASKDILDALCTTDPRRTIPPYEDQNNRRPPFDQTLWLSAAELTRRYGDKWRIWSQKFERADRALSTGLDEILLYTDRRSRMFNRNQDPSVYADSYVLQRVLDRSSKLDRYALRALAAGYRTQELHEPLATLSDTLGTQHVETFLTFAAEYYEEVAAAKNGLWLDGPSRLLERADIHPPMKKKVLDLLLGNILDATPEIGRILRTVLWNRHVHEKSRSTPASLCRSIEAIRKDFGGEFRMRYDALDAKIRAAEDQKKKFKPTNAEEKDLFKAWNATKTMHAFLRDVLQLTPKQLERTASPYVFAQLHTLIDTERDGFTSTSLAAHLENHWRMRANAAGMAQCSRLPADAVRPFDGVLSKALDRQAFEAAKLAAQHLMSRKELTDTDIRYSIIIESNRFAFSASTAELKKNTLAKKNAEKGLNFELKRWQDKDSRIREASRGICAYTGAKLGDVVEYDHIIPRAFTTSAMGSVFNSEANLICVSRPGNQTKADKRYGLNKLHKTYLTAVFGTADVTTIAASIEDIVGKLASANRLRHFELLNEKEQDAVRHALFLDDESDARRIVLRELAAQNKSRVNGTQAWFVRAFMTKLLEITKDWRERTGNTLDIRSWKTDAEVASRLRSALNFHAEITLT

SEQ ID NO: 776 - protein, 406 aa, Sutterella parvirubra
SNLFREEVPYGDHFLPIIQMKNRIYIGYQLPKADGTGGNAVAVLGKDPLELLETLKPFLDREPQAFSDHPVTYKMINERAYELLTKCALTPDQTTELERTQAEVLRSLNYQTSRAAVLGRLVDDKNKFVAKDAVWKEKDFVISFKLSPKKSAFKASGQLELPAKSDWKALVDSPELAINWGQPADDTFSQRIERKVRMNSSHLEHTPKKRVVSLPVVDKPSGGFRIRRHNLDGSAVFQVHTVANNKYGGFSADSAGKVDWSTPVLCGHLQHANLVPLDPETASAEQLVRMSEWRVVETTSDIRLEVCPGTSGRRYVRVELPFTLLQEWLTAGKVADVPVSPLHLPGSIKLTDPKTFCAEAQKTLSIFAQPRATIFFEQLGDRVRFRFEASGGPATMNAAYNAAGRS

SEQ ID NO: 777 - protein, 389 aa, Sutterella wadsworthensis
MKACDLEEKTNHLQACVAIDLGARYTGTFSILHKSSHLPSKDDCRAATYVLPEDGGKMTYSQRNRTAVRHRIRGKKRFALARRMAMLIIREKLAAKSVTLTSSETRRLAEAVGSLLRRRGYNRLETETDNDLTVLENIEPEVFSEHEILGKYFYAGTDLAIQWETLSQDLSKISSLLAERLSEKDFKKYLTGLIPDDKNKIKHIISVFKMLIDEAESINMQCVLGHKHRTQYLSDIHADMHRDTRLSKAAEAFGGVDRLWRLLGNLSNLQLRAHRWYFNAPHLFDDQALEPARLQKTLVRAFKYLHCPQGVESRAQAELVKELEEADDIIDALCTIDPVRTIPPYENQQNRRPPFDQTLYLSPDLGVSGFLCLGRLFQGQPNEAALCFL

SEQ ID NO: 778 - protein, 976 aa, Tannerella sp.
MKKILGLDLGSNSIGWALVNEAENRDEASSIIKLGVRVNPLTVDEMQNFEKGKSITTNADRTLKRSMRRNLQRYKLRRDALIKLLKKVGFITDGTILSEQGNRTTFETYRLRAKAPDEEISLQELARVLLMINKKRGYKSSRKIKEKEAGTLIDGMEVAKKLYDEDLTPGQLCLQLLESGKKSLPDFYSSDLQEEFDRIWNFQKQFNPKAFCDTAKEEIKGKNKSQTWAILAKYFIWMEEMDVWNEKESKTERVEKECKLVGLKRTVKKEEQRKENYCWRVQALTEQLDLEKVAVVLQEINGQISTSSGYLGAISDRSKVLYFNRQTVGQYQMAELEKNPNTSLRNMVFYRQDYLDEFDKIWEKQAEFHKELTVELKKEIRDIIIFYQRRLKSQKGLIGFCEFENREIMVEKNGKMQAKVVGCKVIPRSHPLFQEFKIWQTLNNVEVFAGEKKCKRKRTDAFPGLFDGTEDTLMVEGWRYLYQEEKEILAKELSVKKSLKKEYILKLLFDNPQDLDMNFEQIEGNDTGNVLFSAYSKMIEKYGYEPLDFGKPTDKIIEQLQVIFADLGWNTDLLFVDLNKEGKDLEKQPYFKLWHLLYSFEGDNTPTGNGKLVEKLMELCHVGKECALELVNISFQNDYGSLSAKAIKKILPYLKEGNRYDVACGYAGYRHSKSSLTKEEIENKVLKDKLDILPKNSLRNPVVEKILNQMVNVINAIIDTYGKPDEIRVELARELKKSAKEREELTKAIAKSTREHEEIRKVLQEEFGMINVSRNDIIRYKLYKELKDNGYKTLYSNQDIPKEKVFSKEIDIEHIIPQARLFDDSLSNKTLEYKAINIEKGNKTAYDFVKEKYGEKGLQQYLNRCESLFKGHRTKLRKLKMGQENIPEGFIDRDLRNTQYIAKKALAMLNEICRRVVATTGSITDRLREDWQLVDVLKELRCFRYFKDTKMKANHNKNIFYTSIKVDVSDTSKILK

SEQ ID NO: 779 - protein, 1049 aa, Tistrella mobilis
MINERLTFGIDLGIGSCGWAVLRHADAAGEPGVIEGLGSWCFDVPETSKERIPTNQVRRSNRLLRRVIRRRRNRMAEIRRLFHAQGLLPSADEDALKRPRLDPWELRARGLDQCLSAEEFAVALGHIARHRGFRSSAKRKAANTSGEDSKMLSALLVTRERTARYRTVGEMFARDPEYSARRRNRDGIFDRTVARDDLIHEVGKLFEAQRARGSAFASPDLEADFNAIAFRQAEMQDSERLVGNCPFERDEKRAARWAPSFERFRLLTRLINLRIATAEGERRFTPEDLARVSAELGATAKLPVSRVRALIGLLPDERFTTIRVEDEDRDIVARTGEAAPGTWRLRKTLGEALWAEMQARPDQLDAIAHVLSFFEATAKIRSELDRLGLPAAVIEALDRGLEDGAFAKFKGAGHISAKACRNLLPHLQQGHRYDQACRLAGYDHAASTLSHTAQVVSKAGFNALVTELGESIANPIARKALTEGLKQIRAMCARWGLPGAIHIELAREVGNSIEKRRELESQRETTTKRRQTERDEIRGLLALEDVDDDTLLRYRLWKEQGGKCLYTGKDIHVRQLIATDNSVQVDHILPWSRFGDDSFNNKTLCLASANQRKRGQTPWEWFSLTGTPEAWEVFASRVETSKDLRGFKKRNLLLKNADEVAQRFRSRNLNDTRYAARLLAEAAKLFYPAGDRQEKDGRRRVLTRPGPLTAALRHAWGLESLKKADGKRVSDDRHHALDALAVAAISEREVQRLTRSFQEWEQQGLARPLRHVAPPWPGFRGDVLAAYAQAFVARPERRRARGKGHDASIRQVVGEGPEAQVFERRGLADLKEADLDRVKDPERNQAIIEAVRAWILAGRPADAPPRSPRGDVIVKLRTAPAKKIKPAVPVRGGTADRGDMVRIDVFTRPNRKGRDEWYLVPIYPHQVMNRKAWPHPPMRSVVAYKDEAGWTEIGAEHSFRFSLYPRSYVQLVKSNGDVIEGYLVSMDRSTGAFRVFVHNNPAEMAKGIGAKTLLNLRKFNVDRFGVRTEVKSEVRTWHGEVCTSPVPPD

SEQ ID NO: 780 - protein, 1395 aa, Treponema denticola
MKKEIKDYFLGLDVGTGSVGWAVTDTDYKLLKANRKDLWGMRCFETAETAEVRRLHRGARRRIERRKKRIKLLQELFSQEIAKIDEGFFQRMKESPFYAEDKTILQENALFNDKDFTDKTYHKAYPTINHLIKAWIENKVKPDPRLLYLACHNIIKKRGHFLFEGDFDSENQFDTSIQALFEYLREDMEVDIDADSQKVKEILKDSSLKNSEKQSRLNKILGLKPSDKQKKAITNLISGNKINFADLYDNPDLKDAEKNSISFSKDDFDALSDDLASILGDSFELLLKAKAVYNCSVLSKVIGDEQYLSFAKVKIYEKHKTDLTKLKAVIKKHFPNNYKKVFGYNQDNESKNNYSGYVGVCKTKNKKLVINNSVNQEDFYKFLKPILSAKSEIKEVNDILAEIETGNFLPKQISKSNAEIPYQLRKMELEKILSNAEKHFSFLKQKDEKGLSHSEKIIMLLTFKIPYYIGPINDNHKKSFPDRCWVVKKEKSPSGKTTPWNFFDHIDKEKTAEEFITSRTNFCTYLIGESVLPKNSLLYSEYTVLNEINNLQIIIDGKNICDTKLKQKIYEDLFKKYKKITQKQISTFIKHEGICNKTDEVIILGIDKECTSSLKSYIELKNIFGKQVDEISTKNMLEEIIRWATIYDEGEGKTILKTKIKAEYGKYCSDEQIKKILNLKFSGWGRLSRKFLETVTSEMPGFSEPVNIITAMRETQNNLMELLSSEFKFTENIKKINSGFEDAEKQFSYDGLVKPLFLSPSVKKMLWQTLKLVKEISHITQAPPKKIFIEMAKGAELEPARTKTRLKILQDLYSSCKNDADAFSSEIQYLSGKIENEDNLRLRSDKLYLYYTQLGKCMYCGKPIEIGHVFDTSNYDIDHIYPQSKIKDDSISNRVLVCSSCNKNKEDKYPLKSEIQSKQRGFWNFLQRNNFISLEKLNRLTRTTPISDDETAKFIARQLVETRQATKVAAKVLEKMFPETKIVYSKAETVSMFRNKFDIIKCREINDFHHAHDAYLNIVVGNVYNTKFTNNPWNFIKEKRDNPKIADTYNYYKVFDYDVKRNNITAWEKGKTIITVKDMLKRNTPIYTRQAACKKGGLFDQTIMKKGLGQHPLKKEGPFSNISKYGGYNKVSAAYYTLIEYEEKGNKIRSLETIPLYLVKDIQKDQDVLKSYLTDLLGKKEFKILVPKIKINSLLKINGFPCHITGKTNDSFLLRPAVQFCCSNDEVLYFKKIIRFSEIRSQREKIGKTISPYEDLSFRSYIKENLCKKTKNDEIGEKEFYDLLQKKNLEIYDMLLTKHKDTIYKKRPNSATIDILVKGKEKFKSLIIENQFEVILEILKLFSATRNVSELQHIGGSKYSGVAKIGNKISSLDNCILIYQSITGIFEKRIDLLKV

SEQ ID NO: 781 - protein, 769 aa, Treponema denticola
MKKEIKDYFLGLDVGTGSVGWAVTDTDYKLLKANRKDLWGMRCFETAETAEVRRLHRGARRRIERRKKRIKLLQELFSQEIAKIDEGFFQRMKESPFYAEDKTILQENALFNDKDFTDKTYHKAYPTINHLIKAWIENKVKPDPRLLYLACHNIIKKRGHFLFEGDFDSENQFDTSIQALFEYLREDMEVDIDADSQKVKEILKDSSLKNSEKQSRLNKILGLKPSDKQKKAITNLISGNKINFADLYDNPDLKDAEKNSISFSKDDFDALSDDLASILGDSFELLLKAKAVYNCSVLSKVIGDEQYLSFAKVKIYEKHKTDLTKLKAVIKKHFPNNYKKVFGYNQDNESKNNYSGYVGVCKTKNKKLVINNSVNQEDFYKFLKPILSAKSEIKEVNDILAEIETGNFLPKQISKSNAEIPYQLRKMELEKILSNAEKHFSFLKQKDEKGLSHSEKIIMLLTFKIPYYIGPINDNHKKSFPDRCWVVKKEKSPSGKTTPWNFFDHIDKEKTAEEFITSRTNFCTYLIGESVLPKNSLLYSEYTVLNEINNLQIIIDGKNICDTKLKQKIYEDLFKKYKKITQKQISTFIKHEGICNKTDEVIILGIDKECTSSLKSYIELKNIFGKQVDEISTKNMLEEIIRWATIYDEGEGKTILKTKIKAEYGKYCSDEQIKKILNLKFSGWGRLSRKFLETVTSEMPGFSEPVNIITAMRETQNNLMELLSSEFKFTENIKKINSGFEDAEKQFSYDGLVKPLFLSPSVKKCCGRL

SEQ ID NO: 782 - protein, 1395 aa, Treponema denticola
MKKEIKDYFLGLDVGTGSVGWAVTDTDYKLLKANRKDLWGMRCFETAETAEVRRLHRGARRRIERRKKRIKLLQELFSQEIAKIDEGFFQRMKESPFYAEDKTILQENALFNDKDFTDKTYHKAYPTINHLIKAWIENKVKPDPRLLYLACHNIIKKRGHFLFEGDFDSENQFDTSIQALFEYLREDMEVDIDADSQKVKEILKDSSLKNSEKQSRLNKILGLKPSDKQKKAITNLISGNKINFADLYDNPDLKDAEKNSISFSKDDFDALSDDLASILGDSFELLLKAKAVYNCSVLSKVIGDEQYLSFAKVKIYEKHKTDLTKLKAVIKKHFPNNYKKVFGYNQDNESKNNYSGYVGVCKTKNKKLVINNSVNQEDFYKFLKPILSAKSEIKEVNDILAEIETGNFLPKQISKSNAEIPYQLRKMELEKILSNAEKHFSFLKQKDEKGLSHSEKIIMLLTFKIPYYIGPINDNHKKSFPDRCWVVKKEKSPSGKTTPWNFFDHIDKEKTAEEFITSRTNFCTYLIGESVLPKNSLLYSEYTVLNEINNLQIIIDGKNICDTKLKQKIYEDLFKKYKKITQKQISTFIKHEGICNKTDEVIILGIDKECTSSLKSYIELKNIFGKQVDEISTKNMLEEIIRWATIYDEGEGKTILKTKIKAEYGKYCSDEQIKKILNLKFSGWGRLSRKFLETVTSEMPGFSEPVNIITAMRETQNNLMELLSSEFKFTENIKKINSGFEDAEKQFSYDGLVKPLFLSPSVKKMLWQTLKLVKEISHITQAPPKKIFIEMAKGAELEPARTKTRLKILQDLYSSCKNDADAFSSEIQYLSGKIENEDNLRLRSDKLYLYYTQLGKCMYCGKPIEIGHVFDTSNYDIDHIYPQSKIKDDSISNRVLVCSSCNKNKEDKYPLKSEIQSKQRGFWNFLQRNNFISLEKLNRLTRTTPISDDETAKFIARQLVETRQATKVAAKVLEKMFPETKIVYSKAETVSMFRNKFDIIKCREINDFHHAHDAYLNIVVGNVYNTKFTNNPWNFIKEKRDNPKIADTYNYYKVFDYDVKRNNITAWEKGKTIITVKDMLKRNTPIYTRQAACKKGELFNQTIMKKGLGQHPLKKEGPFSNISKYGGYNKVSAAYYTLIEYEEKVNKIRSLETIPLYLVKDIQKDQDVLKSYLTDLLGKKEIKILVPKIKINSLLKINGFPCHITGKTGDSFVLRPAVQFCCSNDEVLYFKKIIRFNEIRSQREKMGKTISPYEDLSFRSYIKENLCKKTKADEIGEKEFYDLLQKKNLEIYDMLLTKHKDTIYNKRPNSTTLGMLTKGRYEFINLKPKDQIIVMLEILKLFCTTREAIDLGLIKGKPAAGVATLGKKISNLDNCILIYQSITGIFEKRIDLLKV

SEQ ID NO: 783 - protein, 1395 aa, Treponema denticola
MKKEIKDYFLGLDVGTGSVGWAVTDTDYKLLKANRKDLWGMRCFETAETAEVRRLHRGARRRIERRKKRIKLLQELFSQEIAKIDEGFFQRMKESPFYAEDKTILQENTLFNDKDFTDKTYHKAYPTINHLIKAWIENKVKPDPRLLYLACHNIIKKRGHFLFEGDFDSENQFDTSIQALFEYLREDMEVDIDADSQKVKEILKDSSLKNSEKQSRLNKILGLKPSDKQKKAITNLISGNKINFADLYDNPDLKDAEKNSISFSKDDFDALSDDLASILGDSFELLLKAKAVYNCSVLSKVIGDEQYLSFAKVKIYEKHKTDLTKLKNVIKKHFPKDYKKVFGYNKNEKNNNNYSGYVGVCKTKSKKLIINNSVNQEDFYKFLKTILSAKSEIKEVNDILTEIETGTFLPKQISKSNAEIPYQLRKMELEKILSNAEKHFSFLKQKDEKGLSHSEKIIMLLTFKIPYYIGPINDNHKKSFPDRCWVIKKEKSPSGKTTPWNFFDHIDKDKTAEAFITSRTNFCTYLVGESVLPKSSLLYSEYTVLNEINNLQIIIDGKNICDIKLKQKIYEELFKKYKKITQKQISTFIKHEGICNKTDEVIILGIDKECTSSLKSYIELKNIFGKQVDEISTKNMLEEIIRWATIYDEGEGKTILKTKIKAEYGKYCSDEQIKKILNLKFSGWGRLSRKFLETVTSEMPGFSEPVNIITAMRETQNNLMELLSSEFKFTENIKKINSGFEDAEKQFSYNGLVKPLFLSPSVKKMLWQTLKLVKEISHITQAPPKKIFIEMAKGAELEPARTKTRLKILQDLYNNCKNDADAFSSEIKDLSGKIENEDNLRLRSDKLYLYYTQLGKCMYCGKPIEIGHVFDTSNYDIDHIYPQSKIKDDSISNRVLVCSSCNKNKEDKYPLKSEIQSKQRGFWNFLQRNNFISLEKLNRLTRTTPISDDETAKFIARQLVETRQATKVAAKVLEKMFPETKIVYSKAETVSMFRNKFDIIKCREINDFHHAHDAYLNIVVGNVYNTKFTNNPWNFIKEKRDNPKIADTYNYYKVFDYDVKRNNITAWEKGKTIITVKDMLKRNTPIYTRQAACKKGGLFDQTIMKKGLGQHPLKKEGAFSNISKYGGYNKVSAAYYTLIEYEEKGNKIRSLETIPLYLVKDIQKDQDVLKSYLTDLLGKKEIKILVPKIKINSLLKINGFPCHITGKTGDSFVLRPAVQFCCSNDEVLYFKKIIRFNEIRSQREKMGKTISPYEDLSFRSYIKENLCKKTKADEIGEKEFYDLLQKKNLEIYDMLLTKHKDTIYNKRPNSTTLGMLTKGRYEFINLKPKDQIIVMLEILKLFCTTREAIDLGLIKGKPAAGVATLGKKISNPDNCILIYQSITGIFEKRIDLLKV

SEQ ID NO: 784 - protein, 1395 aa, Treponema denticola
MKKEIKDYFLGLDVGTGSVGWAVTDTDYKLLKANRKDLWGMRCFETAETAEVRRLHRGARRRIERRKKRIKLLQELFSQEIAKIDEGFFQRMKESPLYAEDKTILQENTLFNDKDFTDKTYHKAYPTINHLIKAWIENKVKPDPRLLYLACHNIIKKRGHFLFEGDFDSENQFDTSIQALFEYLREDMELDIDADSQKVKEILKDSSLKNSEKQSRLNKMLGLKPSDKQKKAITNLISGNKINFADLYDNPDLKDAEKNSISFSKDDFDALSDDLASILGDSFELLLKAKAVYNCSVLSKVIGDEQYLSFAKVKIYEKHKTDLTKLKNVIKKHFPKDYKKVFGYNKNEKNNNNYSAYVGVCKITHKKLVIKNSASQEDFYKFLKTILSAKSEIKEVNDILTEIETGTFLPKQISKSNAEIPYQLRKMELEKILSNAEKHFSFLKQKDEKGLSHSEKIIMLLTFKIPYYIGPINDNHKKSFPDRCWVVKKEKSPSGKTTPWNFFDHIDKEKTAEEFITSRTNFCTYLIGESVLPKSSLLYSEYTVLNEINNLQIIIDGKNICDIKLKQKIYEELFKKYKKITQKQISTFIKHEGICNKTDEVIILGIDKECTSSLKSYIELKNIFGKQVDEISTKNMLEEIIRWATIYDEGEGKTILKTKIKAEYGKYCSDEQIKKILNLKFSGWGRLSRKFLETVTSEMPGFSEPVNIITAMRETQNNLMELLSSEFKFTENIKKINSGFEDAEKQFSYNGLVKPLFLSPSVKKMLWQTLKLVKEISHITQAPPKKIFIEMAKGAELEPARTKTRLKILQDLYSSCKNDADAFSSEIQYLSGKIENEDNLRLRSDKLYLYYTQLGKCMYCGKPIEIGHVFDTSNYDIDHIYPQSKIKDDSISNRVLVCSSCNKNKEDKYPLKAEIQSKQRGFWNFLQRNNFISLEKLNRLTRTSPISDDETAKFIARQLVETRQATKVAAKVLEKMFPETKIVYSKAETVSMFRNKFDIIKCREINDFHHAHDAYLNIVVGNVYNTKFTNNPWNFIKEKRDNPKIADTYNYYKVFDYDVKRNNITAWEKGKTIITVKDMLKRNTPIYTRQAACKKGELFNQTIMKKGLGQHPLKKEGPLSNISKYGGYNKVSAAYYTLIEYEEKGSKIRSLETIPLYLVKDIQKNKDGLKSYLTDQIGKKEIKILIPKIKINSLLKINGFPCHITGKMGEAFVLRPAVQFCCSNDEALYFKKIIRFNEIRKQREKMGKTISPYEDLSFRSYIKDNLCKKTKADEIEEKEFYDLLQKKNLEIYDMLLTKHKDTIYKKRPNSATIDILVKGKEKFKSLIIENQFEVILEILKLFSATRNVSDLQHIGGSKNAGNARVGNKISSLDNCILIYQSITGIFEKRIDLLKI

SEQ ID NO: 785 - protein, 1395 aa, Treponema denticola
MKKEIKDYFLGLDVGTGSVGWAVTDTDYKLLKANRKDLWGMRCFETAETAEVRRLHRGARRRIERRKKRIKLLQELFSQEIAKIDEGFFQRMKESPLYAEDKTILQENTLFNDKDFTDKTYHKAYPTINHLIKAWIENKVKPDPRLLYLACHNIIKKRGHFLFEGDFDSENQFDTSIQALFEYLREDMEVDIDADSQKVKEILKDSSLKNSEKQSRLNKMLGLKPSDKQKKAITNLISGNKINFADLYDNPDLKDAEKNSISFSKDDFDALSDDLASILGDSFELLLKAKAVYNCSVLSKVIGDEQYLSFAKVKIYEKHKTDLTKLKNVIKKHFPKDYKKVFGYNKNEKNNNNYSGYVGVCKTKSKKLIINNSVNQEDFYKFLKTILSAKSEIKEVNDILTEIETGTFLPKQISKSNAEIPYQLRKMELEKILSNAEKHFSFLKQKDEKGLSHSEKIIMLLTFKIPYYIGPINDNHKKSFPDRCWVVKKEKSPSGKTTPWNFFDHIDKEKTAEEFITSRTNFCTYLIGESVLPKNSLLYSEYTVLNEINNLQIIIDGKNICDTKLKQKIYEELFKKYKKITQKQISTFIKHEGICNKTDEVIILGIDKECTSSLKSYIELKNIFGKQVDEISTKNMLEEIIRWATIYDEGEGKTILKTKIKAEYGKYCSDEQIKKILNLKFSGWGRLSRKFLETVTSEMPGFSEPVNIITAMRETQNNLMELLSSEFKFTENIKKINSGFEDVEKQFSYDGLVKPLFLSPSVKKMLWQTLKLVKEISHITQAPPKKIFIEMAKGAELDPVRTKTRLKILQDLYNNCKNDADAFSSEIKDLSGKIENEDNLRLRSDKLYLYYTQLGKCMYCGKPIEIGHVFDTSNYDIDHIYPQSKIKDDSISNRVLVCSSCNKNKEDKYPLKAEIQSKQRGFWNFLQRNNFISLEKFNRLTRATPISDDETAKFIARQLVETRQATKVAARVLEKMFPETKIVYSKAETVSMFRNKFDIVKCREINDFHHAHDAYLNIVVGNVYNTKFTNNLWNFIKEKRDNPKIADTYNYYKVFDYDVKRNNITAWEKGKTIITVKDMLKRNTPIYTRQAACKKGGLFDQTIMKKGLGQHPLKKEGPFSNISKYGGYNKVSAAYYTLIEYEEKGNKIRSLETIPLYLVKDIQKDQDVLKSYLTDLLGKKEFKILVPKIKINSLLKINGFPCHITGKTNDSFLLRPAVQFCCSNDEVLYFKKIIRFSEIRSQREKIGKTISPYEDLSFRSYIKENLCKKTKNDEIGEKEFYDLLQKKNLEIYDMLLTKHKDTIYKKRPNSATIDILVKGKEKFKSLIIENQFEVILEILKLFSATRNVSDLQHIGGSKYSGVAKIGNKISSLDNCILIYQSITGIFEKRIDLLKV

SEQ ID NO: 786 - protein, 357 aa, Treponema denticola
MKKEIKDYFLGLDVGTGSVGWAVTDTDYKLLKANRKDLWGMRCFETAETAEVRRLHRGARRRIERRKKRIKLLQELFSQEIAKTDEGFFQRMKESPFYAEDKTILQENALFNDRDFTDKTYHKAYPTINHLIKAWIENKVKPDPRLLYLACHNIIKKRGHFLFEGDFDSENQFDTSIQAFFEYLREDMEVDIDADSQKIKEILKDSSLKNSEKQSRLNKILGLKSSDKQKKAITNLISGNKINFADLYDNPDLKDAEKNSISFSKDDFDALSDDLASILGDSFELLLKAKAVYNCSVLSKVIGDEQYLSFAKVKIYEKHKTDLTKLKNVIKKHFPKDYKKVFGYNKNEKITTITPDM

SEQ ID NO: 787 - protein, 1395 aa, Treponema denticola
MKKEIKDYFLGLDVGTGSVGWAVTDTDYKLLKANRKDLWGMRCFETAETAEVRRLHRGARRRIERRKKRIKLLQELFSQEIAKTDEGFFQRMKESPFYAEDKTILQENALFNDRDFTDKTYHKAYPTINHLIKAWIENKVKPDPRLLYLACHNIIKKRGHFLFEGDFDSENQFDTSIQALFEYLREDMEVDIDADSQKVKEILKDSSLKNSEKQSRLNKMLGLKPSDKQKKAITNLISGNKINFADLYDNPDLKDAEKNSISFSKDDFDALSDDLASILGDSFELLLKAKAVYNCSVLSKVIGDEQYLSFAKVKIYEKHKTDLTKLKNVIKKHFPNDYKKVFGYNKNEKNNNNYSAYVGVCKTKSKKLVINNTVNQEDFYKFLKPILLAKSEIKEVNDILTEIETGTFLPKQISKSNAEIPYQLRKMELEKILSNAEKHFSFLKQKDEKGLSHSEKIIMLLTFKIPYYIGPINDNHKKSFPDRCWVIKKEKSPSGKTTPWNFFDHIDKDKTAEAFITSRTNFCTYLVGESVLPKNSLLYSEYTVLNEINNLQIIIDGKNICDIKLKQKIYEELFKKYKKITQKQISTFIKHEGICNKTDEVIILGIDKECTSSLKSYIELKNIFGKQVDEISTKNMLEEIIRWATIYDEGEGKTILKTKIKAEYGKYCSDEQIKKILNLKFSGWGRLSRKFLETVTSEMPGFSEPVNIITAMRETQNNLMELLSSEFKFTENIKKINSGFEDVEKQFSYDSLVKPLFLSPSVKKMLWQTLKLVKEISHITQAPPKKIFIEMAKGAELDPVRTKTRLKILQDLYNNCKNDADAFSSEIKDLSGKIENEDNLRLRSDKLYLYYTQLGKCMYCGKPIEIGHVFDTSNYDIDHIYPQSKIKDDSISNRVLVCSSCNKNKEDKYPLKAEIQSKQRGFWNFLQRNNFISLEKLNRLTRTSPISDDETAKFIARQLVETRQATKVAAKVLEKMFPETKIVYSKAETVSMFRNKFDIIKCREINDFHHAHDAYLNIVVGNVYNTKFTNNPWNFIKEKRDNPKIADTYNYYKVFDYDVKRNNITAWEKGKTIITVKDMLKRNTPIYTRQAACKKGELFNQTIMKKGLGQHPLKKEGPLSNISKYGGYNKVSAAYYTLIEYEEKGSKIRSLETIPLYLVKDIQKNKDGLKSYLTDQIGKKEIKILIPKIKINSLLKINGFPCHITGKMGEAFVLRPAVQFCCSNDEALYFKKIIRFNEIRKQREKMGKTISPYEDLSFRSYIKDNLCKKTKADEIEEKEFYDLLQKKNLEIYDMLLTKHKDTIYKKRPNSATIDILVKGKEKFKSLIIENQFEVILEILKLFSATRNVSDLQHIGGSKNAGNARVGNKISSLDNCILIYQSITGIFEKRIDLLKI

SEQ ID NO: 788 - protein, 631 aa, Treponema denticola
MLWQTLKLVKEISHITQAPPKKIFIEMAKGAELEPARTKTRLKILQDLYNNCKNDADAFSSEIKDLSGKIENEDNLRLRSDKLYLYYTQLGKCMYCGKPIEIGHVFDTSNYDIDHIYPQSKIKDDSISNRVLVCSSCNKNKEDKYPLRSEIQSKQRGFWNFLQRNNFISLEKLNRLTRTTPISDDETAKFIARQLVETRQATKVAAKVLEKMFPETKIVYSKAETVSMFRNKFDIVKCREINDFHHAHDAYLNIVVGNIYNTKFTNNPWNFIKEKRDNPKIADTYNYYKVFDYDVKRNNITAWEKGKTIITVKDMLKRNTPIYTRQAACKKGGLFDQTIMKKGLGQHPLKKEGPFSNISKYGGYNKVSAAYYTLIEYEEKENKIRSLETIPLYLVKDIQKSQEKLKSYLTDLLGKKEIKILVPKIKINSLLKINGFPCHITGKTNDSFLLRPAVQFCCSNDEVLYFKKIIRFNEIRSQREKMGKTISPYEDLSFRSYIKENLCKKTKNDEIGEKEFYDLLQKKNLEIYDMLLTKHKDTIYNKRPNSTTLGMLTKGRYEFINLKPKDQIIVMLEILKLFCTTREAIDLGLIKGKPAAGVATLGKKISNLDNCILIYQSITGIFEKRIDLLKV

SEQ ID NO: 789 - protein, 631 aa, Treponema denticola
MLWQTLKLVKEISHITQAPPKKIFIEMAKGAELEPARTKTRLKILQDLYSSCKNDADAFSSEIQYLSGKIENEDNLRLRSDKLYLYYTQLGKCMYCGKPIEIGHVFDTSNYDIDHIYPQSKIKDDSISNRVLVCSSCNKNKEDKYPLKSEIQSKQRGFWNFLQRNNFISLEKLNRLTRTTPISDDETAKFIARQLVETRQATKVAAKVLEKMFPETKIVYSKAETVSMFRNKFDIIKCREINDFHHAHDAYLNIVVGNVYNTKFTNNPWNFIKEKRDNPKIADTYNYYKVFDYDVKRNNITAWEKGKTIITVKDMLKRNTPIYTRQAACKKGELFNQTIMKKGLGQHPLKKEGPFSNISKYGGYNKVSAAYYTLIEYEEKVNKIRSLETIPLYLVKDIQKDQDVLKSYLTDLLGKKEIKILVPKIKINSLLKINGFPCHITGKTGDSFVLRPAVQFCCSNDEVLYFKKIIRFNEIRSQREKMGKTISPYEDLSFRSYIKENLCKKTKADEIGEKEFYDLLQKKNLEIYDMLLTKHKDTIYNKRPNSTTLGMLTKGRYEFINLKPKDQIIVMLEILKLFCTTREAIDLGLIKGKPAAGVATLGKKISNLDNCILIYQSITGIFEKRIDLLKV

SEQ ID NO: 790 - protein, 370 aa, Treponema denticola
MTEIETGTFLPKQISKSNAEIPYQLRKMELEKILSNAEKHFSFLKQKDEKGLSHSEKIIMLLTFKIPYYIGPINDNHKKSFPDRCWVVKKEKSPSGKTTPWNFFDHIDKEKTAEEFITSRTNFCTYLVGESVLPKSSLLYSEYTVLNEINNLQIIIDGKNICDIKLKQKIYEELFKKYKKITQKQISTFIKHEGICNKTDEVIILGIDKECTSSLKSYIELKNIFGKQVDEISTKNMLEDIIRWAAIYDEGEGKTILKTKIKAEYGKYCSDEQIKKILNLKFSGWGRLSRKFLETVTSEMPGFSEPVNIITAMRETQNNLMELLSSEFKFTENIKKINSGFEDVEKQFSYDGLVKPLFLSPSVKKCCGRL

SEQ ID NO: 791 - protein, 591 aa, Treponema phagedenis
MARGKEAEKGRTSSRYASIKALYENCKQDLADYDAVLEQFKSEEPLRLRSDKLYLYYTQLGRCMYTGRVIDIDRLMSDNSAYDIDHIYPRSKIKDDSLTNRVLVVKDANQDKRDEPLSPQIQDKQKGFWDFLKHNNFISIEKYERLTYRGYFTEEMLSGFIARQLVETRQGTKTAGQILEQLYPDSTVVYCKAANTSEFRQKFNLIKCREINDLHHAHDAYLNIAVGNVYYTKFTSNPRNFMKLKEPYNLRELFDRDVERNNTIAWVKNKTITTIKDMLKRNTPLYTRYAYCKTGGFFDQNIMKKGKGQFPLKENSPLSDISKYGGYNKVSGAYFILVQKKEKDAVVRILETVPLYLLNKPGKESENVREYLSTALGTKDFKILIPKIKINSLFKINGFLVHITGKTNDRFLVRSAVQFFCDDNLTLFFKRIIAFNGLRNLNKDKSMTAYDDNTMRVYVRGNLFKDKNQLFDKNKFNEIVKGKNISVYKDMVKRYETSIYKFRPNTAVIPILKSGEDKFINLPIEEQFKILQEILKLFGAINGTANLTLIGGRPSTGEMKISNNISNLKQCILIHQSPTGVFEQQIDLLKI

SEQ ID NO: 792 - protein, 1062 aa, Treponema sp.
MIMKLEKWRLGLDLGTNSIGWSVFSLDKDNSVQDLIDMGVRIFSDGRDPKTKEPLAVARRTARSQRKLIYRRKLRRKQVFKFLQEQGLFPKTKEECMTLKSLNPYELRIKALDEKLEPYELGRALFNLAVRRGFKSNRKDGSREEVSEKKSPDEIKTQADMQTHLEKAIKENGCRTITEFLYKNQGENGGIRFAPGRMTYYPTRKMYEEEFNLIRSKQEKYYPQVDWDDIYKAIFYQRPLKPQQRGYCIYENDKERTFKAMPCSQKLRILQDIGNLAYYEGGSKKRVELNDNQDKVLYELLNSKDKVTFDQMRKALCLADSNSFNLEENRDFLIGNPTAVKMRSKNRFGKLWDEIPLEEQDLIIETIITADEDDAVYEVIKKYDLTQEQRDFIVKNTILQSGTSMLCKEVSEKLVKRLEEIADLKYHEAVESLGYKFADQTVEKYDLLPYYGKVLPGSTMEIDLSAPETNPEKHYGKISNPTVHVALNQTRVVVNALIKEYGKPSQIAIELSRDLKNNVEKKAEIARKQNQRAKENIAINDTISALYHTAFPGKSFYPNRNDRMKYRLWSELGLGNKCIYCGKGISGAELFTKEIEIEHILPFSRTLLDAESNLTVAHSSCNAFKAERSPFEAFGTNPSGYSWQEIIQRANQLKNTSKKNKFSPNAMDSFEKDSSFIARQLSDNQYIAKAALRYLKCLVENPSDVWTTNGSMTKLLRDKWEMDSILCRKFTEKEVALLGLKPEQIGNYKKNRFDHRHHAIDAVVIGLTDRSMVQKLATKNSHKGNRIEIPEFPILRSDLIEKVKNIVVSFKPDHGAEGKLSKETLLGKIKLHGKETFVCRENIVSLSEKNLDDIVDEKIKSKVKDYVAKHKGQKIEAVLSDFSKENGIKKVRCVNRVQTPIEITSGKISRYLSPEDYFAAVIWEIPGEKKTFKAQYIRRNEVEKNSKGLNVVKPAVLENGKPHPAAKQVCLLHKDDYLEFSDKGKMYFCRIAGYAATNNKLDIRPVYAVSYCADWINSTNETMLTGYWKPTPTQNWVSVNVLFDKQKARLVTVSPIGRVFRK

SEQ ID NO: 793 - protein, 281 aa, Treponema vincentii
MKTLGLDIGTNSIGWGIVDETANKIEDCGVYIFPEGVKKEKGNESSKAAERTSFRLARRLKFRRKLRKCETLKVLIKNKMCPLTMEELEKWRKQKIYPVSQDFLNWYRTDELKNWEPYFLRKKCAEQKAGPYEIGRALYHLAQRRGFLSNRKESTKASDGKVSKSIDELSSLMDGRTLGQYFYELKQSGEKVRGKYTSRKEHYEKEFNKICEVQEISPELKDDLYRAIFFQRKLKSQKFLVGKCTFERNKPRAPISHFEFEEFRMLSFINSIKIAKKLRRR

SEQ ID NO: 794 - protein, 675 aa, uncultured bacterium
MTAENYSNVRFAFDIGTNSIGWAVFQLNDKQEATSILNAGARIFSDGRDPKTFEPLAVRRRNVRSASRMRDRYLRRRKRTLDKLIGYGLLPEDKAERDKILLETNDKPSGSTDKKTDPYSLRARALEEKLPLAYVARALFHIGQRRGFKSNRKADRKSNEKGKIAAGIEELSGLMHQSHAPTLGAYLAKRREEGHVVRLRASSEALTNKAYAFYPERAMLEDEFHKIWQAQAEYYPDVLTKEREEELFHVMFFQRPLKEQKVGLCTLVEGELRLPKSDPLFQQFRLYKEINELAIILPDLSQRKLTMEERDTLITLMRPAKTKTFAALRKALKIPAGGRFNKETENRKQLTGDEVYSVFSKPELFGGDWAKFSIEQQREIIDQLNNEENPDKLEEWLKNKFPKLSDEQRSEIINANLPDGYGRFGITATSKILEQLKKDVISEAEAAHRCGFDHSLANRNWKGLDELPRYQEVLERHIVPGTGDKNDIYDIYKGRLTNPTVHIGLNQVRRLTNRLIKAYGKPWQIVVELARDLPMSSEERKEHNKTLNDNIKAGFERTQKLERLGQKDNANNRLLLKLWEELGKDPDDRKSIYSGTRITEPMLFSGEVEIDHILPFSLTYDDSYANKILCLREENRIKRNRAPADVTEWKDRYDEIIGRSKNCQRTNKNVLGPMQ

SEQ ID NO: 795 - protein, 1017 aa, uncultured bacterium]
MRVDSLGRCLSDEEWARVIYHLCKHRGFHWISRAEAKQTEGDSKSEGGKVKQGLAGTAKLMDEKGYRSAAEMVLAEFPEAQRNKQGEYRKALSRELLAKELALLFARQRVFGNRHATDTLETAILGNSDKKSGLFWQQKPALAGADLLKMLGTCTFEKNEYRAPKASFTAERHVWLTRLNNLRIVTDGITRQLTEQERQLVLPLPYRQAGDLTYKQLGMALTKAGLLEAGCFKFIGLAYPTEAQKAEGKTKDPESATLVKIPAWQELRQTLNKASLNDEWEKLSGDALCGQPEIFDKIAWILSVYKDDDEVRTELAKLVLPNPEGLTEALLNIRFDKFHALSLKALRAIVPHMEKGLRYDEACVQAGYHHSQLHKIGEGEHKYLPPLYDGRDGDGRMIFAEDADIPRNPVVLRSLNQARKVVNAIIRRYGSPSAVHIEMARDLSRPFDERNKIKKDQDEYQARNQRDREQFIELFGHPPKGLEFEKWRLYREQNGQCAYSQKPLASSGDVAEIFLDGSTEIDHALPYSRSFDDSKNNKVLVLTRENRDKGNRTPYEYLGGAENSERWQRFFSFVESNKAYRLAKRTRLLRKDFGAKESEEFRERNLNDTRYVCRFFKNYVEQHLKLAEGSEAKRCVVVSGQLTNFLRTRWGLLKIRSDSDRHHALDAAVVAACSHSMVQRLSNYSRTRELEQVRDGFVNIETGEIVNPAMHQQLREHFPDPWPYFRHELEARLKIDSPALLREEMARLSSYTEEELAALKPLFVSRAPQRRNGGAAHKDTIYGQPEKLKKNGSVSQKVALASLALKDIDLLADPHRNAKLYGAIRERLEAHGGKGDKAFPATNPLRKPDKEGNPTGPIVRTVTKVIDKLSGIPVRGGIAKNDTMLRVDVFTKAGRFHLVPVYVHHRVTGLPNQAITRGKDENQWAIIDDTFEWRFSLYPNDLVQIRLKDETHLGYYASTDRSTSSISIWAHDRNQSVGKDGLIRSIGVTTAKDIEKFHVDTLGNVYPAPPEKRRGLA

SEQ ID NO: 796 - protein, 600 aa, uncultured bacterium]
VNAIIKKHGSLSAVHIEMARDLSRPLDERREVKKLQEEFKDRNDKARESFEADHGYRPKGIVFEKWMLYREQHGKCAYSMEGLDIDRVLNDANYAQIDHALPYSRSYDDSKNNKVLVLTRENQNKGNRTAYEYLTSFAGGEDGDRWRNYAAWVNSNKSYRMAKRNRLLRKNYGPDEASGFKDRNLNDTRYICKFFKNYVEEHLQLAPRADGNANKRCVVVNGQLTAFLRARWGLSKVRSESDRHHALDAAVVAACSHGMVKALADYARNKEVAYLREGFPDPETGEIINPEAHARGVHHFPEPWAHFRHELQVRLYSDDLQALREDLQRLGTYSEQDLLGVRTLFVSRAPQRRNDGAVHKETIYAQPEALRKQGGVVQKVPLTSLSLKDLDNLADPHRNAKLYTALRARLEAHGGKADKAFGPDQPFYKPDKNGNPTGPIVRTIKLVIDKLSGIPIRGGVAKNDTMLRVDVFTKAGKFHLVPVYVHHRVTGLPDRAIVAFKDEVEWTQVDDSFKFLFSIHPNDLIRIGLKAKEPMIGYFASCHRGTGAFNVWSHDRNTSVGKSGSVEGIGIKTALSLEKLNIDVLGNVYPARPEQRHGLA

SEQ ID NO: 797 - protein, 1011 aa, uncultured delta
MSSKAIDSLEQLDLFKPQEYTLGLDLGIKSIGWAILSGERIANAGVYLFETAEELNSTGNKLISKAAERGRKRRIRRMLDRKARRGRHIRYLLEREGLPTDELEEVVVHQSNRTLWDVRAEAVERKLTKQELAAVLFHLVRHRGYFPNTKKLPPDDESDSADEEQGKINRATSRLREELKASDCKTIGQFLAQNRDRQRNREGDYSNLMARKLVFEEALQILAFQRKQGHELSKDFEKTYLDVLMGQRSGRSPKLGNCSLIPSELRAPSSAPSTEWFKFLQNLGNLQISNAYREEWSIDAPRRAQIIDACSQRSTSSYWQIRRDFQIPDEYRFNLVNYERRDPDVDLQEYLQQQERKTLANFRNWKQLEKIIGTGHPIQTLDEAARLITLIKDDEKLSDQLADLLPEASDKAITQLCELDFTTAAKISLEAMYRILPHMNQGMGFFDACQQESLPEIGVPPAGDRVPPFDEMYNPVVNRVLSQSRKLINAVIDEYGMPAKIRVELARDLGKGRELRERIKLDQLDKSKQNDQRAEDFRAEFQQAPRGDQSLRYRLWKEQNCTCPYSGRMIPVNSVLSEDTQIDHILPISQSFDNSLSNKVLCFTEENAQKSNRTPFEYLDAADFQRLEAISGNWPEAKRNKLLHKSFGKVAEEWKSRALNDTRYLTSALADHLRHHLPDSKIQTVNGRITGYLRKQWGLEKDRDKHTHHAVDAIVVACTTPAIVQQVTLYHQDIRRYKKLGEKRPTPWPETFRQDVLDVEEEIFITRQPKKVSGGIQTKDTLRKHRSKPDRQRVALTKVKLADLERLVEKDASNRNLYEHLKQCLEESGDQPTKAFKAPFYMPSGPEAKQRPILSKVTLLREKPEPPKQLTELSGGRRYDSMAQGRLDIYRYKPGGKRKDEYRVVLQRMIDLMRGEENVHVFQKGVPYDQGPEIEQNYTFLFSLYFDDLVEFQRSADSEVIRGYYRTFNIANGQLKISTYLEGRQDFDFFGANRLAHFAKVQVNLLGKVIK

SEQ ID NO: 798 - protein, 1011 aa, Veillonella sp.; identical to SEQ ID NO: 797

SEQ ID NO: 799 - protein, 1120 aa, Veillonella sp.
MGFKANLVNLFTDEDIEVILPEEKEFKSINLHEGIYEDVRDAYEDAWGDRFAIVDQCKVLHDIIVISSIIKPGQSLSEAKIESYNQHKEDLVLLKSVLKEDRKLYDDMFVVDTDKGTNYVKYTKQGVNGNTSATQEEFYKYVRKVVSVLPETEHTRRIVQKLEEGTFLPLQRISKNGVVPYQLHKEELVRILDKATVNFPFLNKVENGLTVADKIISILEFKIPYYVGPLNPTHSIENGGFAWVVRKEAGQVLPWNFEQKVDVQASAVKFIENLTNKCTYLIDQDVLPKYSLLYAEFSLLNELNNIRVNDKPLPADVKQAFIRDHFISLQDSKTATKKVVAKYLVDNNYVSQPPIITGMDQQIATKLTSHRDMTRILGEHFDHAMAEDIIRYITIFGESKDMLRQVLKNYYGDRLTTEQIKKLGKLTYTGWGRLSKKFLSDIWGMKKNDDDAEAGTIIEHMREGQENLMQLLSSSYSFIDVVQEYVTNVLGEKEKTAFEMLEDLSLSPMVKRSVWQTLRILDEIVSIRKELPKKIFVEVARTNKADKKRTQSRKALLEELYKQIKDEDVHVLQQELESKEDSALNSKKLYLYFTQMGRCMYSGRRIDIHELFTDKYDIDHIYPRSLTKDDSWHNIVLVEKQLNAEKTDRFPILSAIQSKQKGFWKLLWDRGFISEKKYDRLVRTTDLTDEELNQFINRQMVSTNQSVKAVTTLLHQLYPETEVVFSKAENVSDFRHDYDFVKVRSINHHHHAKDAYLNIVVGNVYHEKFTKNFLSFAKQKGTRRTYNLTKIFEYEIKLTEESKKVIWDPNIHMDIVKKMMKSNDVRVTQRAVPQKGGLSDETIYKKGIAKRGVYLPLKSSDERVRDVEKYGGRTSITISEYIILNIRDTSDQDRIEIFSLPLYIAGKKDIHKAIEEAYLSTCKKPASVVDIQILYRGLYIGSKVNINGFTYYMGGKTGSNVSIDSAVDVVMDITSSVYIKLLEKVAIKKIENPKTFRIENIKTSYNHKEVTVSKEQNIALYQELLKKLDTPLFSKMKGNKLEEFRTVGFDTFIALSLEEQASVLLEVLNVLTNFKTKRDITKIGMTSSRSTLGINISNTEQFSVITTSITGLYEQEIKIK

SEQ ID NO: 800 - protein, 983 aa, Verminephrobacter aporrectodeae
MRRRRDRLLKRKARMHDQLMRHGFFPADAAGRKVLERLNPYQLRAKGLHQALTPGEFARALFHINQRRGFQSNRKTDRKDNESGALKQAISELRAQIHDSGCATVGEWFWKERMQQKPEGVHRQGVRARYRETPYTTDEGRQRIDKRYDLYVDRAMIEQEFDALWAVQAALQPGLFTDAACKELRYTLLFQRKLRPVKPGRCTLLPEEERAPLALPSTQRFRILQEVNHLRLLDEALREVPLTLAQRDALVAALESQGKLGFAPMRKLLKLPGTVKFNLEDEKRTELKGNATSAILARKDLFGPAWAGFDAALQDEIVWQLVSEEGEGRLIAWLQQHTGVDEARAEAIADTSLPEGYGSLSRKALERIVPALQREVCSYDKAVQAAGFAHHSDLGFDFEHSGDEVQQVGERIIASTGEVRPLFAFKQLPYYGKALQRHVAFGSGKPEDPEEKRHGKIANPTVHIGLNQVRTVVNALIRRYGRPSEVVVELARDLKQSREQQQETQRKQAENQRRNTRIRERIAETLGISPERVRSSDIQKWILWEELSFDVVDRRCPYSGEQISTTMLLSPKVEIEHILPFSQTLDDSLNNRTVALREANRIKRNRTPWDARADFEARGWSYEGILHRAERMPLRKRYRFAPDGYQRWLGEDKDFLARALNDTRYLSRVAANYLRLVCPKPQGVRVIPGRMTAMLRAKFGLNDVLGLDGEKNRNDHRHHAVDACVIGVTDQGLMQRFARASAQAREDGLTRLVQDMPLPWPSYRDHVERAVRHIWVSHKPDHGFEGAMMEETAYGIRKDGSIKPRRKADGSAGREVVNLIRITESRQPVRHGVDSQGQPLPYKGYVGGSNYCIEITANDQGKWEGAVISTFEAYRIVRASGWGRLRHCSHGQNGRPLMMRLMIGDAVRLALDGSEKTMRVVKISANGQVFLVAPNEANVDARNRDKADPFAYVSKKAGSFQSAKARQVSISPIGELRDPGFKG

SEQ ID NO: 801 - DNA, 17 bp, Homo sapiens
tgcttactggtttgaag

SEQ ID NO: 802 - DNA, 17 bp, Homo sapiens
tgaagggcaacaaaata

SEQ ID NO: 803 - DNA, 17 bp, Homo sapiens
ctttattctttatattt

SEQ ID NO: 804 - DNA, 17 bp, Homo sapiens
gtgtagtgggatgagca

SEQ ID NO: 805 - DNA, 17 bp, Homo sapiens
tgggatgagcagagaac

SEQ ID NO: 806 - DNA, 17 bp, Homo sapiens
ctgattcttttcgcctt

SEQ ID NO: 807 - DNA, 17 bp, Homo sapiens
ctccaccctccttcaaa

SEQ ID NO: 808 - DNA, 17 bp, Homo sapiens
ctgtctatatgattgat

SEQ ID NO: 809 - DNA, 17 bp, Homo sapiens
catctggccagaagagc

SEQ ID NO: 810 - DNA, 17 bp, Homo sapiens
agctgagacatccgttc

SEQ ID NO: 811 - DNA, 17 bp, Homo sapiens
ctgagatgagtaaaaga

SEQ ID NO: 812 - DNA, 17 bp, Homo sapiens
tttacaggaaacccata

SEQ ID NO: 813 - DNA, 17 bp, Homo sapiens
cccatagaagacatttg

SEQ ID NO: 814 - DNA, 17 bp, Homo sapiens
aatgagtttcagacggt

SEQ ID NO: 815 - DNA, 17 bp, Homo sapiens
gacggttataacatcaa

SEQ ID NO: 816 - DNA, 17 bp, Homo sapiens
ttataacatcaaagata

SEQ ID NO: 817 - DNA, 17 bp, Homo sapiens
gcaatagtattttaata

SEQ ID NO: 818 - DNA, 17 bp, Homo sapiens
atgccttctgaatatgt

SEQ ID NO: 819 - DNA, 17 bp, Homo sapiens
tcttttttctttttcct

SEQ ID NO: 820 - DNA, 17 bp, Homo sapiens
ggtcaaaattaatatta

SEQ ID NO: 821 - DNA, 17 bp, Homo sapiens
ctaatatatcagtttca

SEQ ID NO: 822 - DNA, 17 bp, Homo sapiens
cactccatggtgctata

SEQ ID NO: 823 - DNA, 17 bp, Homo sapiens
gtgctttcatgaattcc

SEQ ID NO: 824 - DNA, 17 bp, Homo sapiens
gccaagctctccatcta

SEQ ID NO: 825 - DNA, 17 bp, Homo sapiens
gcagcaaaccttccctt

SEQ ID NO: 826 - DNA, 17 bp, Homo sapiens
aagagagttaattcaat

SEQ ID NO: 827 - DNA, 17 bp, Homo sapiens
aaaaacctattgatgta

SEQ ID NO: 828 - DNA, 17 bp, Homo sapiens
attcatggagggcaact

SEQ ID NO: 829 - DNA, 17 bp, Homo sapiens
aagatcactttttattt

SEQ ID NO: 830 - DNA, 17 bp, Homo sapiens
tttatttatgcacaggg

SEQ ID NO: 831 - DNA, 17 bp, Homo sapiens
aagtgtcaagtccaatc

SEQ ID NO: 832 - DNA, 17 bp, Homo sapiens
atctatgacatcaatta

SEQ ID NO: 833 - DNA, 17 bp, Homo sapiens
tcatctttggttttgtg

SEQ ID NO: 834 - DNA, 17 bp, Homo sapiens
aaaggctgaagagcatg

SEQ ID NO: 835 - DNA, 17 bp, Homo sapiens
gcccagtgggactttgg

SEQ ID NO: 836 - DNA, 17 bp, Homo sapiens
aatacaatgtgtcaact

SEQ ID NO: 837 - DNA, 17 bp, Homo sapiens
atcttcttcatcatcct

SEQ ID NO: 838 - DNA, 17 bp, Homo sapiens
acggtcacctttggggt

SEQ ID NO: 839 - DNA, 17 bp, Homo sapiens
ctcaaaaagaaggtctt

SEQ ID NO: 840 - DNA, 17 bp, Homo sapiens
cctgcagctctcatttt

SEQ ID NO: 841 - DNA, 17 bp, Homo sapiens
caattctggaagaattt

SEQ ID NO: 842 - DNA, 17 bp, Homo sapiens
gtcgaaatgagaagaag

SEQ ID NO: 843 - DNA, 17 bp, Homo sapiens
attttctcttctgggct

SEQ ID NO: 844 - DNA, 17 bp, Homo sapiens
ttctcttctgggctccc

SEQ ID NO: 845 - DNA, 17 bp, Homo sapiens
acaacattgtccttctc

SEQ ID NO: 846 - DNA, 17 bp, Homo sapiens
tgaataattgcagtagc

SEQ ID NO: 847 - DNA, 17 bp, Homo sapiens
ttggaccaagctatgca

SEQ ID NO: 848 - DNA, 17 bp, Homo sapiens
tcttagtcttcttccaa

SEQ ID NO: 849 - DNA, 17 bp, Homo sapiens
ccgagcgagcaagctca

SEQ ID NO: 850 - DNA, 17 bp, Homo sapiens
ggaaatatctgtgggct

SEQ ID NO: 851 - DNA, 17 bp, Homo sapiens
gtgacccagtcagagtt

SEQ ID NO: 852 - DNA, 17 bp, Homo sapiens
tgcacatggcttagttt

SEQ ID NO: 853 - DNA, 17 bp, Homo sapiens
cacatggcttagttttc

SEQ ID NO: 854 - DNA, 17 bp, Homo sapiens
caacctttttatctccc

SEQ ID NO: 855 - DNA, 17 bp, Homo sapiens
ttcacatgcatcaagtt

SEQ ID NO: 856 - DNA, 17 bp, Homo sapiens
ttcttgagtttagtgat

SEQ ID NO: 857 - DNA, 17 bp, Homo sapiens
ccaaaattatttcagaa

SEQ ID NO: 858 - DNA, 17 bp, Homo sapiens
atgtacaactttttacc

SEQ ID NO: 859 - DNA, 17 bp, Homo sapiens
ctttttacctagtacaa

SEQ ID NO: 860 - DNA, 17 bp, Homo sapiens
taggttgtaaatgtgtt

SEQ ID NO: 861 - DNA, 17 bp, Homo sapiens
gtcttgctatggggaga

SEQ ID NO: 862 - DNA, 17 bp, Homo sapiens
aatatgattagtaaaga

SEQ ID NO: 863 - DNA, 17 bp, Homo sapiens
gatcatctattgctggc

SEQ ID NO: 864 - DNA, 17 bp, Homo sapiens
caagcttggctgtagaa

SEQ ID NO: 865 - DNA, 17 bp, Homo sapiens
gagacagagctggttgg

SEQ ID NO: 866 - DNA, 17 bp, Homo sapiens
gggaagacatggggagg

SEQ ID NO: 867 - DNA, 17 bp, Homo sapiens
tttagggcaaggagacc

SEQ ID NO: 868 - DNA, 17 bp, Homo sapiens
attggagaaacccttga

SEQ ID NO: 869 - DNA, 17 bp, Homo sapiens
acccttgaaaagacatc

SEQ ID NO: 870 - DNA, 17 bp, Homo sapiens
ggtctggtttgcagagc

SEQ ID NO: 871 - DNA, 17 bp, Homo sapiens
tctggtttgcagagctt

SEQ ID NO: 872 - DNA, 17 bp, Homo sapiens
gaggagactagatttat

SEQ ID NO: 873 - DNA, 17 bp, Homo sapiens
cacgaggtatgaggtct

SEQ ID NO: 874 - DNA, 17 bp, Homo sapiens
tctaggaacatacttca

SEQ ID NO: 875 - DNA, 17 bp, Homo sapiens
taggaacatacttcagc

SEQ ID NO: 876 - DNA, 17 bp, Homo sapiens
ggaggattctatgaggc

SEQ ID NO: 877 - DNA, 17 bp, Homo sapiens
caaccacaggcagcatt

SEQ ID NO: 878 - DNA, 17 bp, Homo sapiens
aggcagcatttagcaca

SEQ ID NO: 879 - DNA, 17 bp, Homo sapiens
gcagcatttagcacata

SEQ ID NO: 880 - DNA, 17 bp, Homo sapiens
aagatgctgcctgccca

SEQ ID NO: 881 - DNA, 17 bp, Homo sapiens
gatgctgcctgcccagt

SEQ ID NO: 882 - DNA, 17 bp, Homo sapiens
aataggcaaagggggga

SEQ ID NO: 883 - DNA, 17 bp, Homo sapiens
ctgccttgagccttaaa

SEQ ID NO: 884 - DNA, 17 bp, Homo sapiens
agccttaaaacccacaa

SEQ ID NO: 885 - DNA, 17 bp, Homo sapiens
tattccagatgccttct

SEQ ID NO: 886 - DNA, 17 bp, Homo sapiens
tctccagacaaaccaga

SEQ ID NO: 887 - DNA, 17 bp, Homo sapiens
ttctgtctcatatgatt

SEQ ID NO: 888 - DNA, 17 bp, Homo sapiens
gatggctaaaaccatca

SEQ ID NO: 889 - DNA, 17 bp, Homo sapiens
tcttaagttgtggagag

SEQ ID NO: 890 - DNA, 17 bp, Homo sapiens
accctctgggccaagtc

SEQ ID NO: 891 - DNA, 17 bp, Homo sapiens
ggccaagtcaaagacat

SEQ ID NO: 892 - DNA, 17 bp, Homo sapiens
attcttatgtatgtgaa

SEQ ID NO: 893 - DNA, 17 bp, Homo sapiens
aaaatatgcatctaata

SEQ ID NO: 894 - DNA, 17 bp, Homo sapiens
cttgctctttcagtcaa

SEQ ID NO: 895 - DNA, 17 bp, Homo sapiens
agtgtacatttagagaa

SEQ ID NO: 896 - DNA, 17 bp, Homo sapiens
tatgtgctattctctaa

SEQ ID NO: 897 - DNA, 17 bp, Homo sapiens
ttcaagcaatttgtaac

SEQ ID NO: 898 - DNA, 17 bp, Homo sapiens
agcaatttgtaactttc

SEQ ID NO: 899 - DNA, 17 bp, Homo sapiens
tatgctactgttgcact

SEQ ID NO: 900 - DNA, 17 bp, Homo sapiens
aacttaagagcaaaagg

SEQ ID NO: 901 - DNA, 17 bp, Homo sapiens
tcccttcgttgcttcct

SEQ ID NO: 902 - DNA, 17 bp, Homo sapiens
cgttgcttcctgctgac

SEQ ID NO: 903 - DNA, 17 bp, Homo sapiens
gtagcacctcttattat

SEQ ID NO: 904 - DNA, 17 bp, Homo sapiens
tagccatcccccaaatt

SEQ ID NO: 905 - DNA, 17 bp, Homo sapiens
aaaacagtctcaagtat

SEQ ID NO: 906 - DNA, 17 bp, Homo sapiens
gtatgtgcacaatcata

SEQ ID NO: 907 - DNA, 17 bp, Homo sapiens
tgcacaatcatatgaga

SEQ ID NO: 908 - DNA, 17 bp, Homo sapiens
ctttgaaatgaatatac

SEQ ID NO: 909 - DNA, 17 bp, Homo sapiens
taaatgcagaaaatgat

SEQ ID NO: 910 - DNA, 17 bp, Homo sapiens
ttgcctcatagaatcct

SEQ ID NO: 911 - DNA, 17 bp, Homo sapiens
gtcagaagcattcagtg

SEQ ID NO: 912 - DNA, 17 bp, Homo sapiens
gcaaaccagacccatcc

SEQ ID NO: 913 - DNA, 17 bp, Homo sapiens
cttcctgaccctccttt

SEQ ID NO: 914 - DNA, 17 bp, Homo sapiens
ccacagagtaaaccttc

SEQ ID NO: 915 - DNA, 17 bp, Homo sapiens
caaccagctctgtctcc

SEQ ID NO: 916 - DNA, 17 bp, Homo sapiens
cttccccagctctccca

SEQ ID NO: 917 - DNA, 17 bp, Homo sapiens
ccataccttggagggga

SEQ ID NO: 918 - DNA, 17 bp, Homo sapiens
ataccttggaggggaaa

SEQ ID NO: 919 - DNA, 17 bp, Homo sapiens
gtcttttctccccatag

SEQ ID NO: 920 - DNA, 17 bp, Homo sapiens
caagacaaagacctgtt

SEQ ID NO: 921 - DNA, 17 bp, Homo sapiens
agacaaagacctgtttt

SEQ ID NO: 922 - DNA, 17 bp, Homo sapiens
agacctgttttaaacac

SEQ ID NO: 923 - DNA, 17 bp, Homo sapiens
ttgtactaggtaaaaag

SEQ ID NO: 924 - DNA, 17 bp, Homo sapiens
ctgaggctttcttttaa

SEQ ID NO: 925 - DNA, 17 bp, Homo sapiens
aaaggttgctatttttc

SEQ ID NO: 926 - DNA, 17 bp, Homo sapiens
aaaagatctaatctact

SEQ ID NO: 927 - DNA, 17 bp, Homo sapiens
atgaatcttagaccctc

SEQ ID NO: 928 - DNA, 17 bp, Homo sapiens
tatgaaaactaagccat

SEQ ID NO: 929 - DNA, 17 bp, Homo sapiens
cagcccacttgagtccg

SEQ ID NO: 930 - DNA, 17 bp, Homo sapiens
ttgagtccgtgtcacaa

SEQ ID NO: 931 - DNA, 17 bp, Homo sapiens
agcctcttgctggaaaa

SEQ ID NO: 932 - DNA, 17 bp, Homo sapiens
tagtttctgaacttctc

SEQ ID NO: 933 - DNA, 17 bp, Homo sapiens
tggaaggtgttcaggag

SEQ ID NO: 934 - DNA, 17 bp, Homo sapiens
ggagcccagaagagaaa

SEQ ID NO: 935 - DNA, 17 bp, Homo sapiens
atgatggtgaagataag

SEQ ID NO: 936 - DNA, 17 bp, Homo sapiens
gtgcctcttcttctcat

SEQ ID NO: 937 - DNA, 17 bp, Homo sapiens
cccgagtagcagatgac

SEQ ID NO: 938 - DNA, 17 bp, Homo sapiens
tgattcctgggagagac

SEQ ID NO: 939 - DNA, 17 bp, Homo sapiens
attcctgggagagacgc

SEQ ID NO: 940 - DNA, 17 bp, Homo sapiens
acagccaccacccaagt

SEQ ID NO: 941 - DNA, 17 bp, Homo sapiens
ccgtcctggcttttaaa

SEQ ID NO: 942 - DNA, 17 bp, Homo sapiens
gtcctggcttttaaagc

SEQ ID NO: 943 - DNA, 17 bp, Homo sapiens
aaagcaaacacagcatg

SEQ ID NO: 944 - DNA, 17 bp, Homo sapiens
atagagccctgtcaaga

SEQ ID NO: 945 - DNA, 17 bp, Homo sapiens
agagccctgtcaagagt

SEQ ID NO: 946 - DNA, 17 bp, Homo sapiens
gcatagtgagcccagaa

SEQ ID NO: 947 - DNA, 17 bp, Homo sapiens
aggggacagtaagaagg

SEQ ID NO: 948 - DNA, 17 bp, Homo sapiens
aggatgaccagcatgtt

SEQ ID NO: 949 - DNA, 17 bp, Homo sapiens
tgcccacaaaaccaaag

SEQ ID NO: 950 - DNA, 17 bp, Homo sapiens
aggcgggctgcgatttg

SEQ ID NO: 951 - DNA, 17 bp, Homo sapiens
tgatgtcatagattgga

SEQ ID NO: 952 - DNA, 17 bp, Homo sapiens
catgaatgcaaactgtt

SEQ ID NO: 953 - DNA, 17 bp, Homo sapiens
tcaataggtttttaatt

SEQ ID NO: 954 - DNA, 17 bp, Homo sapiens
taattgcctacatagat

SEQ ID NO: 955 - DNA, 17 bp, Homo sapiens
catggagtgaatgaagc

SEQ ID NO: 956 - DNA, 17 bp, Homo sapiens
ggagtgaatgaagcttt

SEQ ID NO: 957 - DNA, 17 bp, Homo sapiens
aaaaaagagaaccagac

SEQ ID NO: 958 - DNA, 17 bp, Homo sapiens
aaaagagaaccagactt

SEQ ID NO: 959 - DNA, 17 bp, Homo sapiens
tagacacaacttcttgt

SEQ ID NO: 960 - DNA, 17 bp, Homo sapiens
tccctttaaagtctttc

SEQ ID NO: 961 - DNA, 17 bp, Homo sapiens
actcatctcagaagcta

SEQ ID NO: 962 - DNA, 17 bp, Homo sapiens
ctgtgcaaatcaatcat

SEQ ID NO: 963 - DNA, 17 bp, Homo sapiens
gaaggcgaaaagaatca

SEQ ID NO: 964 - DNA, 17 bp, Homo sapiens
ttgttctctgctcatcc

SEQ ID NO: 965 - DNA, 17 bp, Homo sapiens
gttctctgctcatccca

SEQ ID NO: 966 - DNA, 17 bp, Homo sapiens
aaggatatcagagctag

SEQ ID NO: 967 - DNA, 17 bp, Homo sapiens
atcagagctagaagaac

SEQ ID NO: 968 - DNA, 17 bp, Homo sapiens
cattcatctagtcaaaa

SEQ ID NO: 969 - DNA, 17 bp, Homo sapiens
agtaagcatttatgagg

SEQ ID NO: 970 - DNA, 17 bp, Homo sapiens
aggactcacactatgcc

SEQ ID NO: 971 - DNA, 17 bp, Homo sapiens
tgaagctatgagaaatt

SEQ ID NO: 972 - DNA, 17 bp, Homo sapiens
ctatgagaaattttcca

SEQ ID NO: 973 - DNA, 17 bp, Homo sapiens
ttctttatgactatact

SEQ ID NO: 974 - DNA, 17 bp, Homo sapiens
tatagtatagtcataaa

SEQ ID NO: 975 - DNA, 17 bp, Homo sapiens
gtggaaaatttctcata

SEQ ID NO: 976 - DNA, 17 bp, Homo sapiens
ctggagtgaagaatcct

SEQ ID NO: 977 - DNA, 17 bp, Homo sapiens
gcttactggtttgaagg

SEQ ID NO: 978 - DNA, 17 bp, Homo sapiens
tccccactaagatcctg

SEQ ID NO: 979 - DNA, 17 bp, Homo sapiens
gcttggcctgttagtta

SEQ ID NO: 980 - DNA, 17 bp, Homo sapiens
agtaaaagactttacag

SEQ ID NO: 981 - DNA, 17 bp, Homo sapiens
acggttataacatcaaa

SEQ ID NO: 982 - DNA, 17 bp, Homo sapiens
aagatttgcagagagat

SEQ ID NO: 983 - DNA, 17 bp, Homo sapiens
tgtgcccacaagaagtt

SEQ ID NO: 984 - DNA, 17 bp, Homo sapiens
ttcctccagacaagagg

SEQ ID NO: 985 - DNA, 17 bp, Homo sapiens
agtggacagggaagcta

SEQ ID NO: 986 - DNA, 17 bp, Homo sapiens
gtttgcattcatggagg

SEQ ID NO: 987 - DNA, 17 bp, Homo sapiens
tgccaaaaaatcaatgt

SEQ ID NO: 988 - DNA, 17 bp, Homo sapiens
tctgggctcactatgct

SEQ ID NO: 989 - DNA, 17 bp, Homo sapiens
ggtcatctgctactcgg

SEQ ID NO: 990 - DNA, 17 bp, Homo sapiens
ctaaaaactctgcttcg

SEQ ID NO: 991 - DNA, 17 bp, Homo sapiens
tgtcgaaatgagaagaa

SEQ ID NO: 992 - DNA, 17 bp, Homo sapiens
aagaggcacagggctgt

SEQ ID NO: 993 - DNA, 17 bp, Homo sapiens
tttattttctcttctgg

SEQ ID NO: 994 - DNA, 17 bp, Homo sapiens
tggaccaagctatgcag

SEQ ID NO: 995 - DNA, 17 bp, Homo sapiens
ctattttccagcaagag

SEQ ID NO: 996 - DNA, 17 bp, Homo sapiens
aatatctgtgggcttgt

SEQ ID NO: 997 - DNA, 17 bp, Homo sapiens
cggactcaagtgggctg

SEQ ID NO: 998 - DNA, 17 bp, Homo sapiens
gaagttactgttataga

SEQ ID NO: 999 - DNA, 17 bp, Homo sapiens
ctcccttcactccgaaa

SEQ ID NO: 1000 - DNA, 17 bp, Homo sapiens
tgtatatttaaaagaaa

SEQ ID NO: 1001 - DNA, 17 bp, Homo sapiens
tttttacctagtacaag

SEQ ID NO: 1002 - DNA, 17 bp, Homo sapiens
ctgggagagctggggaa

SEQ ID NO: 1003 - DNA, 17 bp, Homo sapiens
aagcttggctgtagaag

SEQ ID NO: 1004 - DNA, 17 bp, Homo sapiens
gggagatcctggttggt

SEQ ID NO: 1005 - DNA, 17 bp, Homo sapiens
tgcagaaggtttactct

SEQ ID NO: 1006 - DNA, 17 bp, Homo sapiens
aggagggaggtattcgt

SEQ ID NO: 1007 - DNA, 17 bp, Homo sapiens
ttcgtgcagcatatgag

SEQ ID NO: 1008 - DNA, 17 bp, Homo sapiens
atttgggttggaagtga

SEQ ID NO: 1009 - DNA, 17 bp, Homo sapiens
aagtgagggtcagagag

SEQ ID NO: 1010 - DNA, 17 bp, Homo sapiens
gctgtctttcactgaat

SEQ ID NO: 1011 - DNA, 17 bp, Homo sapiens
acgaggtatgaggtcta

SEQ ID NO: 1012 - DNA, 17 bp, Homo sapiens
tactacacattcaataa

SEQ ID NO: 1013 - DNA, 17 bp, Homo sapiens
taagcatcaaactctta

SEQ ID NO: 1014 - DNA, 17 bp, Homo sapiens
caaagcattgagcaaag

SEQ ID NO: 1015 - DNA, 17 bp, Homo sapiens
aagcattgagcaaaggg

SEQ ID NO: 1016 - DNA, 17 bp, Homo sapiens
ataggcaaaggggggaa

SEQ ID NO: 1017 - DNA, 17 bp, Homo sapiens
tggaaataagctgcctt

SEQ ID NO: 1018 - DNA, 17 bp, Homo sapiens
gaatgggggtggggggg

SEQ ID NO: 1019 - DNA, 17 bp, Homo sapiens
gtggggggggcgcctta

SEQ ID NO: 1020 - DNA, 17 bp, Homo sapiens
ctccagacaaaccagaa

SEQ ID NO: 1021 - DNA, 17 bp, Homo sapiens
aggtttttttctgttct

SEQ ID NO: 1022 - DNA, 17 bp, Homo sapiens
ctactcagggaatgaag

SEQ ID NO: 1023 - DNA, 17 bp, Homo sapiens
tcagaataataagaggt

SEQ ID NO: 1024 - DNA, 17 bp, Homo sapiens
tgctactgactttctca

SEQ ID NO: 1025 - DNA, 17 bp, Homo sapiens
gtggctgtcagcaggaa

SEQ ID NO: 1026 - DNA, 17 bp, Homo sapiens
ttgtggagagtgcaaca

SEQ ID NO: 1027 - DNA, 17 bp, Homo sapiens
agtgcaacagtagcata

SEQ ID NO: 1028 - DNA, 17 bp, Homo sapiens
ttcttatgtatgtgaaa

SEQ ID NO: 1029 - DNA, 17 bp, Homo sapiens
tgcttgaaagaaaatat

SEQ ID NO: 1030 - DNA, 17 bp, Homo sapiens
cactaaggaagaaaaca

SEQ ID NO: 1031 - DNA, 17 bp, Homo sapiens
gaaggtgttttttatta

SEQ ID NO: 1032 - DNA, 17 bp, Homo sapiens
cagaatgtctttgactt

SEQ ID NO: 1033 - DNA, 17 bp, Homo sapiens
acttggcccagagggta

SEQ ID NO: 1034 - DNA, 17 bp, Homo sapiens
ctcaccgttcatattca

SEQ ID NO: 1035 - DNA, 17 bp, Homo sapiens
tatgtgcacaatcatat

SEQ ID NO: 1036 - DNA, 17 bp, Homo sapiens
gaaggcatctggaataa

SEQ ID NO: 1037 - DNA, 17 bp, Homo sapiens
gggttttaaggctcaag

SEQ ID NO: 1038 - DNA, 17 bp, Homo sapiens
ggttaaatgcagaaaat

SEQ ID NO: 1039 - DNA, 17 bp, Homo sapiens
tgtgcactgggcaggca

SEQ ID NO: 1040 - DNA, 17 bp, Homo sapiens
gtgctatccctgaatga

SEQ ID NO: 1041 - DNA, 17 bp, Homo sapiens
tgagtaactaagagttt

SEQ ID NO: 1042 - DNA, 17 bp, Homo sapiens
aaatgctgcctgtggtt

SEQ ID NO: 1043 - DNA, 17 bp, Homo sapiens
ctctctgactcctctct

SEQ ID NO: 1044 - DNA, 17 bp, Homo sapiens
ttcctgaccctcctttg

SEQ ID NO: 1045 - DNA, 17 bp, Homo sapiens
ccacaagtctctcgcct

SEQ ID NO: 1046 - DNA, 17 bp, Homo sapiens
cctggttctaagtcagt

SEQ ID NO: 1047 - DNA, 17 bp, Homo sapiens
ctaatctactttaaaca

SEQ ID NO: 1048 - DNA, 17 bp, Homo sapiens
atgccaaataaatggat

SEQ ID NO: 1049 - DNA, 17 bp, Homo sapiens
ccagcccacttgagtcc

SEQ ID NO: 1050 - DNA, 17 bp, Homo sapiens
gcccacagatatttcct

SEQ ID NO: 1051 - DNA, 17 bp, Homo sapiens
aagaagactaagaggta

SEQ ID NO: 1052 - DNA, 17 bp, Homo sapiens
gaaggacaatgttgtag

SEQ ID NO: 1053 - DNA, 17 bp, Homo sapiens
catgatggtgaagataa

SEQ ID NO: 1054 - DNA, 17 bp, Homo sapiens
cctcttcttctcatttc

SEQ ID NO: 1055 - DNA, 17 bp, Homo sapiens
cttctcatttcgacacc

SEQ ID NO: 1056 - DNA, 17 bp, Homo sapiens
gtttttaggattcccga

SEQ ID NO: 1057 - DNA, 17 bp, Homo sapiens
gaaattcttccagaatt

SEQ ID NO: 1058 - DNA, 17 bp, Homo sapiens
aaagatgattcctggga

SEQ ID NO: 1059 - DNA, 17 bp, Homo sapiens
agatgattcctgggaga

SEQ ID NO: 1060 - DNA, 17 bp, Homo sapiens
agcatggacgacagcca

SEQ ID NO: 1061 - DNA, 17 bp, Homo sapiens
aagaagattccagagaa

SEQ ID NO: 1062 - DNA, 17 bp, Homo sapiens
caaagtcccactgggcg

SEQ ID NO: 1063 - DNA, 17 bp, Homo sapiens
atgaggatgaccagcat

SEQ ID NO: 1064 - DNA, 17 bp, Homo sapiens
gaggcgggctgcgattt

SEQ ID NO: 1065 - DNA, 17 bp, Homo sapiens
cattgattttttggcag

SEQ ID NO: 1066 - DNA, 17 bp, Homo sapiens
tatactaactgtgccat

SEQ ID NO: 1067 - DNA, 17 bp, Homo sapiens
aggaaaaagaaaaaaga

SEQ ID NO: 1068 - DNA, 17 bp, Homo sapiens
agacacaacttcttgtg

SEQ ID NO: 1069 - DNA, 17 bp, Homo sapiens
gggcacatattcagaag

SEQ ID NO: 1070 - DNA, 17 bp, Homo sapiens
tgatgttataaccgtct

SEQ ID NO: 1071 - DNA, 17 bp, Homo sapiens
gtcttttactcatctca

SEQ ID NO: 1072 - DNA, 17 bp, Homo sapiens
gctaactaacaggccaa

SEQ ID NO: 1073 - DNA, 17 bp, Homo sapiens
ggccaagcagctgagag

SEQ ID NO: 1074 - DNA, 17 bp, Homo sapiens
ggagagtttcttgtagg

SEQ ID NO: 1075 - DNA, 17 bp, Homo sapiens
tgtattgaaggcgaaaa

SEQ ID NO: 1076 - DNA, 17 bp, Homo sapiens
atctttttctggaccca

SEQ ID NO: 1077 - DNA, 17 bp, Homo sapiens
cagtaagcatttatgag

SEQ ID NO: 1078 - DNA, 17 bp, Homo sapiens
ggactcacactatgcca

SEQ ID NO: 1079 - DNA, 17 bp, Homo sapiens
gtgtagtgggatgagca

SEQ ID NO: 1080 - DNA, 17 bp, Homo sapiens
tgggatgagcagagaac

SEQ ID NO: 1081 - DNA, 17 bp, Homo sapiens
ctgattcttttcgcctt

SEQ ID NO: 1082 - DNA, 17 bp, Homo sapiens
ctccaccctccttcaaa

SEQ ID NO: 1083 - DNA, 17 bp, Homo sapiens
ctgtctatatgattgat

SEQ ID NO: 1084 - DNA, 17 bp, Homo sapiens
catctggccagaagagc

SEQ ID NO: 1085 - DNA, 17 bp, Homo sapiens
agctgagacatccgttc

SEQ ID NO: 1086 - DNA, 17 bp, Homo sapiens
atgccttctgaatatgt

SEQ ID NO: 1087 - DNA, 17 bp, Homo sapiens
tcttttttctttttcct

SEQ ID NO: 1088 - DNA, 17 bp, Homo sapiens
gccaagctctccatcta

SEQ ID NO: 1089 - DNA, 17 bp, Homo sapiens
gcagcaaaccttccctt

SEQ ID NO: 1090 - DNA, 17 bp, Homo sapiens
aagagagttaattcaat

SEQ ID NO: 1091 - DNA, 17 bp, Homo sapiens
aaaaacctattgatgta

SEQ ID NO: 1092 - DNA, 17 bp, Homo sapiens
attcatggagggcaact

SEQ ID NO: 1093 - DNA, 17 bp, Homo sapiens
aagatcactttttattt

SEQ ID NO: 1094 - DNA, 17 bp, Homo sapiens
tttatttatgcacaggg

SEQ ID NO: 1095 - DNA, 17 bp, Homo sapiens
aagtgtcaagtccaatc

SEQ ID NO: 1096 - DNA, 17 bp, Homo sapiens
atctatgacatcaatta

SEQ ID NO: 1097 - DNA, 17 bp, Homo sapiens
tcatctttggttttgtg

SEQ ID NO: 1098 - DNA, 17 bp, Homo sapiens
aaaggctgaagagcatg

SEQ ID NO: 1099 - DNA, 17 bp, Homo sapiens
gcccagtgggactttgg

SEQ ID NO: 1100 - DNA, 17 bp, Homo sapiens
aatacaatgtgtcaact

SEQ ID NO: 1101 - DNA, 17 bp, Homo sapiens
atcttcttcatcatcct

SEQ ID NO: 1102 - DNA, 17 bp, Homo sapiens
acggtcacctttggggt

SEQ ID NO: 1103 - DNA, 17 bp, Homo sapiens
ctcaaaaagaaggtctt

SEQ ID NO: 1104 - DNA, 17 bp, Homo sapiens
cctgcagctctcatttt

SEQ ID NO: 1105 - DNA, 17 bp, Homo sapiens
caattctggaagaattt

SEQ ID NO: 1106 - DNA, 17 bp, Homo sapiens
gtcgaaatgagaagaag

SEQ ID NO: 1107 - DNA, 17 bp, Homo sapiens
attttctcttctgggct

SEQ ID NO: 1108 - DNA, 17 bp, Homo sapiens
ttctcttctgggctccc

SEQ ID NO: 1109 - DNA, 17 bp, Homo sapiens
acaacattgtccttctc

SEQ ID NO: 1110 - DNA, 17 bp, Homo sapiens
tgaataattgcagtagc

SEQ ID NO: 1111 - DNA, 17 bp, Homo sapiens
ttggaccaagctatgca

SEQ ID NO: 1112 - DNA, 17 bp, Homo sapiens
tcttagtcttcttccaa

SEQ ID NO: 1113 - DNA, 17 bp, Homo sapiens
ccgagcgagcaagctca

SEQ ID NO: 1114 - DNA, 17 bp, Homo sapiens
ggaaatatctgtgggct

SEQ ID NO: 1115 - DNA, 17 bp, Homo sapiens
gtgacccagtcagagtt

SEQ ID NO: 1116 - DNA, 17 bp, Homo sapiens
tgcacatggcttagttt

SEQ ID NO: 1117 - DNA, 17 bp, Homo sapiens
cacatggcttagttttc

SEQ ID NO: 1118 - DNA, 17 bp, Homo sapiens
caacctttttatctccc

SEQ ID NO: 1119 - DNA, 17 bp, Homo sapiens
ttcacatgcatcaagtt

SEQ ID NO: 1120 - DNA, 17 bp, Homo sapiens
ttcttgagtttagtgat

SEQ ID NO: 1121 - DNA, 17 bp, Homo sapiens
ccaaaattatttcagaa

SEQ ID NO: 1122 - DNA, 17 bp, Homo sapiens
atgtacaactttttacc

SEQ ID NO: 1123 - DNA, 17 bp, Homo sapiens
ctttttacctagtacaa

SEQ ID NO: 1124 - DNA, 17 bp, Homo sapiens
taggttgtaaatgtgtt

SEQ ID NO: 1125 - DNA, 17 bp, Homo sapiens
gtcttgctatggggaga

SEQ ID NO: 1126 - DNA, 17 bp, Homo sapiens
aatatgattagtaaaga

SEQ ID NO: 1127 - DNA, 17 bp, Homo sapiens
gatcatctattgctggc

SEQ ID NO: 1128 - DNA, 17 bp, Homo sapiens
caagcttggctgtagaa

SEQ ID NO: 1129 - DNA, 17 bp, Homo sapiens
gagacagagctggttgg

SEQ ID NO: 1130 - DNA, 17 bp, Homo sapiens
gggaagacatggggagg

SEQ ID NO: 1131 - DNA, 17 bp, Homo sapiens
tttagggcaaggagacc

SEQ ID NO: 1132 - DNA, 17 bp, Homo sapiens
attggagaaacccttga

SEQ ID NO: 1133 - DNA, 17 bp, Homo sapiens
acccttgaaaagacatc

SEQ ID NO: 1134 - DNA, 17 bp, Homo sapiens
ggtctggtttgcagagc

SEQ ID NO: 1135 - DNA, 17 bp, Homo sapiens
tctggtttgcagagctt

SEQ ID NO: 1136 - DNA, 17 bp, Homo sapiens
gaggagactagatttat

SEQ ID NO: 1137 - DNA, 17 bp, Homo sapiens
cacgaggtatgaggtct

SEQ ID NO: 1138 - DNA, 17 bp, Homo sapiens
tctaggaacatacttca

SEQ ID NO: 1139 - DNA, 17 bp, Homo sapiens
taggaacatacttcagc

SEQ ID NO: 1140 - DNA, 17 bp, Homo sapiens
ggaggattctatgaggc

SEQ ID NO: 1141 - DNA, 17 bp, Homo sapiens
caaccacaggcagcatt

SEQ ID NO: 1142 - DNA, 17 bp, Homo sapiens
aggcagcatttagcaca

SEQ ID NO: 1143 - DNA, 17 bp, Homo sapiens
gcagcatttagcacata

SEQ ID NO: 1144 - DNA, 17 bp, Homo sapiens
aagatgctgcctgccca

SEQ ID NO: 1145 - DNA, 17 bp, Homo sapiens
gatgctgcctgcccagt

SEQ ID NO: 1146 - DNA, 17 bp, Homo sapiens
aataggcaaagggggga

SEQ ID NO: 1147 - DNA, 17 bp, Homo sapiens
ctgccttgagccttaaa

SEQ ID NO: 1148 - DNA, 17 bp, Homo sapiens
agccttaaaacccacaa

SEQ ID NO: 1149 - DNA, 17 bp, Homo sapiens
tattccagatgccttct

SEQ ID NO: 1150 - DNA, 17 bp, Homo sapiens
tctccagacaaaccaga

SEQ ID NO: 1151 - DNA, 17 bp, Homo sapiens
ttctgtctcatatgatt

SEQ ID NO: 1152 - DNA, 17 bp, Homo sapiens
gatggctaaaaccatca

SEQ ID NO: 1153 - DNA, 17 bp, Homo sapiens
tcttaagttgtggagag

SEQ ID NO: 1154 - DNA, 17 bp, Homo sapiens
accctctgggccaagtc

SEQ ID NO: 1155 - DNA, 17 bp, Homo sapiens
ggccaagtcaaagacat

SEQ ID NO: 1156 - DNA, 17 bp, Homo sapiens
attcttatgtatgtgaa

SEQ ID NO: 1157 - DNA, 17 bp, Homo sapiens
aaaatatgcatctaata

SEQ ID NO: 1158 - DNA, 17 bp, Homo sapiens
ttcaagcaatttgtaac

SEQ ID NO: 1159 - DNA, 17 bp, Homo sapiens
agcaatttgtaactttc

SEQ ID NO: 1160 - DNA, 17 bp, Homo sapiens
tatgctactgttgcact

SEQ ID NO: 1161 - DNA, 17 bp, Homo sapiens
aacttaagagcaaaagg

SEQ ID NO: 1162 - DNA, 17 bp, Homo sapiens
tcccttcgttgcttcct

SEQ ID NO: 1163 - DNA, 17 bp, Homo sapiens
cgttgcttcctgctgac

SEQ ID NO: 1164 - DNA, 17 bp, Homo sapiens
gtagcacctcttattat

SEQ ID NO: 1165 - DNA, 17 bp, Homo sapiens
tagccatcccccaaatt

SEQ ID NO: 1166 - DNA, 17 bp, Homo sapiens
aaaacagtctcaagtat

SEQ ID NO: 1167 - DNA, 17 bp, Homo sapiens
gtatgtgcacaatcata

SEQ ID NO: 1168 - DNA, 17 bp, Homo sapiens
tgcacaatcatatgaga

SEQ ID NO: 1169 - DNA, 17 bp, Homo sapiens
ctttgaaatgaatatac

SEQ ID NO: 1170 - DNA, 17 bp, Homo sapiens
taaatgcagaaaatgat

SEQ ID NO: 1171 - DNA, 17 bp, Homo sapiens
ttgcctcatagaatcct

SEQ ID NO: 1172 - DNA, 17 bp, Homo sapiens
gtcagaagcattcagtg

SEQ ID NO: 1173 - DNA, 17 bp, Homo sapiens
gcaaaccagacccatcc

SEQ ID NO: 1174 - DNA, 17 bp, Homo sapiens
cttcctgaccctccttt

SEQ ID NO: 1175 - DNA, 17 bp, Homo sapiens
ccacagagtaaaccttc

SEQ ID NO: 1176 - DNA, 17 bp, Homo sapiens
caaccagctctgtctcc

SEQ ID NO: 1177 - DNA, 17 bp, Homo sapiens
cttccccagctctccca

SEQ ID NO: 1178 - DNA, 17 bp, Homo sapiens
ccataccttggagggga

SEQ ID NO: 1179 - DNA, 17 bp, Homo sapiens
ataccttggaggggaaa

SEQ ID NO: 1180 - DNA, 17 bp, Homo sapiens
gtcttttctccccatag

SEQ ID NO: 1181 - DNA, 17 bp, Homo sapiens
caagacaaagacctgtt

SEQ ID NO: 1182 - DNA, 17 bp, Homo sapiens
agacaaagacctgtttt

SEQ ID NO: 1183 - DNA, 17 bp, Homo sapiens
agacctgttttaaacac

SEQ ID NO: 1184 - DNA, 17 bp, Homo sapiens
ttgtactaggtaaaaag

SEQ ID NO: 1185 - DNA, 17 bp, Homo sapiens
ctgaggctttcttttaa

SEQ ID NO: 1186 - DNA, 17 bp, Homo sapiens
aaaggttgctatttttc

SEQ ID NO: 1187 - DNA, 17 bp, Homo sapiens
aaaagatctaatctact

SEQ ID NO: 1188 - DNA, 17 bp, Homo sapiens
atgaatcttagaccctc

SEQ ID NO: 1189 - DNA, 17 bp, Homo sapiens
tatgaaaactaagccat

SEQ ID NO: 1190 - DNA, 17 bp, Homo sapiens
cagcccacttgagtccg

SEQ ID NO: 1191 - DNA, 17 bp, Homo sapiens
ttgagtccgtgtcacaa

SEQ ID NO: 1192 - DNA, 17 bp, Homo sapiens
agcctcttgctggaaaa

SEQ ID NO: 1193 - DNA, 17 bp, Homo sapiens
tagtttctgaacttctc

SEQ ID NO: 1194 - DNA, 17 bp, Homo sapiens
tggaaggtgttcaggag

SEQ ID NO: 1195 - DNA, 17 bp, Homo sapiens
ggagcccagaagagaaa

SEQ ID NO: 1196 - DNA, 17 bp, Homo sapiens
atgatggtgaagataag

SEQ ID NO: 1197 - DNA, 17 bp, Homo sapiens
gtgcctcttcttctcat

SEQ ID NO: 1198 - DNA, 17 bp, Homo sapiens
cccgagtagcagatgac

SEQ ID NO: 1199 - DNA, 17 bp, Homo sapiens
tgattcctgggagagac

SEQ ID NO: 1200 - DNA, 17 bp, Homo sapiens
attcctgggagagacgc

SEQ ID NO: 1201 - DNA, 17 bp, Homo sapiens
acagccaccacccaagt

SEQ ID NO: 1202 - DNA, 17 bp, Homo sapiens
ccgtcctggcttttaaa

SEQ ID NO: 1203 - DNA, 17 bp, Homo sapiens
gtcctggcttttaaagc

SEQ ID NO: 1204 - DNA, 17 bp, Homo sapiens
aaagcaaacacagcatg

SEQ ID NO: 1205 - DNA, 17 bp, Homo sapiens
atagagccctgtcaaga

SEQ ID NO: 1206 - DNA, 17 bp, Homo sapiens
agagccctgtcaagagt

SEQ ID NO: 1207 - DNA, 17 bp, Homo sapiens
gcatagtgagcccagaa

SEQ ID NO: 1208 - DNA, 17 bp, Homo sapiens
aggggacagtaagaagg

SEQ ID NO: 1209 - DNA, 17 bp, Homo sapiens
aggatgaccagcatgtt

SEQ ID NO: 1210 - DNA, 17 bp, Homo sapiens
tgcccacaaaaccaaag

SEQ ID NO: 1211 - DNA, 17 bp, Homo sapiens
aggcgggctgcgatttg

SEQ ID NO: 1212 - DNA, 17 bp, Homo sapiens
tgatgtcatagattgga

SEQ ID NO: 1213 - DNA, 17 bp, Homo sapiens
catgaatgcaaactgtt

SEQ ID NO: 1214 - DNA, 17 bp, Homo sapiens
tcaataggtttttaatt

SEQ ID NO: 1215 - DNA, 17 bp, Homo sapiens
taattgcctacatagat

SEQ ID NO: 1216 - DNA, 17 bp, Homo sapiens
aaaaaagagaaccagac

SEQ ID NO: 1217 - DNA, 17 bp, Homo sapiens
aaaagagaaccagactt

SEQ ID NO: 1218 - DNA, 17 bp, Homo sapiens
tagacacaacttcttgt

SEQ ID NO: 1219 - DNA, 17 bp, Homo sapiens
ctgtgcaaatcaatcat

SEQ ID NO: 1220 - DNA, 17 bp, Homo sapiens
gaaggcgaaaagaatca

SEQ ID NO: 1221 - DNA, 17 bp, Homo sapiens
ttgttctctgctcatcc

SEQ ID NO: 1222 - DNA, 17 bp, Homo sapiens
gttctctgctcatccca

SEQ ID NO: 1223 - DNA, 17 bp, Homo sapiens
ctggagtgaagaatcct

SEQ ID NO: 1224 - DNA, 17 bp, Homo sapiens
tacaagaaactctcccc

SEQ ID NO: 1225 - DNA, 17 bp, Homo sapiens
aagatttgcagagagat

SEQ ID NO: 1226 - DNA, 17 bp, Homo sapiens
tgtgcccacaagaagtt

SEQ ID NO: 1227 - DNA, 17 bp, Homo sapiens
ctccagacaagagggaa

SEQ ID NO: 1228 - DNA, 17 bp, Homo sapiens
agtggacagggaagcta

SEQ ID NO: 1229 - DNA, 17 bp, Homo sapiens
gtttgcattcatggagg

SEQ ID NO: 1230 - DNA, 17 bp, Homo sapiens
tgccaaaaaatcaatgt

SEQ ID NO: 1231 - DNA, 17 bp, Homo sapiens
tctgggctcactatgct

SEQ ID NO: 1232 - DNA, 17 bp, Homo sapiens
ggtcatctgctactcgg

SEQ ID NO: 1233 - DNA, 17 bp, Homo sapiens
ctaaaaactctgcttcg

SEQ ID NO: 1234 - DNA, 17 bp, Homo sapiens
tgtcgaaatgagaagaa

SEQ ID NO: 1235 - DNA, 17 bp, Homo sapiens
aagaggcacagggctgt

SEQ ID NO: 1236 - DNA, 17 bp, Homo sapiens
tttattttctcttctgg

SEQ ID NO: 1237 - DNA, 17 bp, Homo sapiens
tggaccaagctatgcag

SEQ ID NO: 1238 - DNA, 17 bp, Homo sapiens
ctattttccagcaagag

SEQ ID NO: 1239 - DNA, 17 bp, Homo sapiens
aatatctgtgggcttgt

SEQ ID NO: 1240 - DNA, 17 bp, Homo sapiens
cggactcaagtgggctg

SEQ ID NO: 1241 - DNA, 17 bp, Homo sapiens
gaagttactgttataga

SEQ ID NO: 1242 - DNA, 17 bp, Homo sapiens
ctcccttcactccgaaa

SEQ ID NO: 1243 - DNA, 17 bp, Homo sapiens
tgtatatttaaaagaaa

SEQ ID NO: 1244 - DNA, 17 bp, Homo sapiens
tttttacctagtacaag

SEQ ID NO: 1245 - DNA, 17 bp, Homo sapiens
ctgggagagctggggaa

SEQ ID NO: 1246 - DNA, 17 bp, Homo sapiens
aagcttggctgtagaag

SEQ ID NO: 1247 - DNA, 17 bp, Homo sapiens
gggagatcctggttggt

SEQ ID NO: 1248 - DNA, 17 bp, Homo sapiens
tgcagaaggtttactct

SEQ ID NO: 1249 - DNA, 17 bp, Homo sapiens
aggagggaggtattcgt

SEQ ID NO: 1250 - DNA, 17 bp, Homo sapiens
ttcgtgcagcatatgag

SEQ ID NO: 1251 - DNA, 17 bp, Homo sapiens
atttgggttggaagtga

SEQ ID NO: 1252 - DNA, 17 bp, Homo sapiens
aagtgagggtcagagag

SEQ ID NO: 1253 - DNA, 17 bp, Homo sapiens
gctgtctttcactgaat

SEQ ID NO: 1254 - DNA, 17 bp, Homo sapiens
acgaggtatgaggtcta

SEQ ID NO: 1255 - DNA, 17 bp, Homo sapiens
tactacacattcaataa

SEQ ID NO: 1256 - DNA, 17 bp, Homo sapiens
taagcatcaaactctta

SEQ ID NO: 1257 - DNA, 17 bp, Homo sapiens
caaagcattgagcaaag

SEQ ID NO: 1258 - DNA, 17 bp, Homo sapiens
aagcattgagcaaaggg

SEQ ID NO: 1259 - DNA, 17 bp, Homo sapiens
ataggcaaaggggggaa

SEQ ID NO: 1260 - DNA, 17 bp, Homo sapiens
tggaaataagctgcctt

SEQ ID NO: 1261 - DNA, 17 bp, Homo sapiens
gaatgggggtggggggg

SEQ ID NO: 1262 - DNA, 17 bp, Homo sapiens
gtggggggggcgcctta

SEQ ID NO: 1263 - DNA, 17 bp, Homo sapiens
ctccagacaaaccagaa

SEQ ID NO: 1264 - DNA, 17 bp, Homo sapiens
aggtttttttctgttct

SEQ ID NO: 1265 - DNA, 17 bp, Homo sapiens
ctactcagggaatgaag

SEQ ID NO: 1266 - DNA, 17 bp, Homo sapiens
tcagaataataagaggt

SEQ ID NO: 1267 - DNA, 17 bp, Homo sapiens
tgctactgactttctca

SEQ ID NO: 1268 - DNA, 17 bp, Homo sapiens
gtggctgtcagcaggaa

SEQ ID NO: 1269 - DNA, 17 bp, Homo sapiens
ttgtggagagtgcaaca

SEQ ID NO: 1270 - DNA, 17 bp, Homo sapiens
agtgcaacagtagcata

SEQ ID NO: 1271 - DNA, 17 bp, Homo sapiens
ttcttatgtatgtgaaa

SEQ ID NO: 1272 - DNA, 17 bp, Homo sapiens
tgcttgaaagaaaatat

SEQ ID NO: 1273 - DNA, 17 bp, Homo sapiens
gaaggtgttttttatta

SEQ ID NO: 1274 - DNA, 17 bp, Homo sapiens
cagaatgtctttgactt

SEQ ID NO: 1275 - DNA, 17 bp, Homo sapiens
acttggcccagagggta

SEQ ID NO: 1276 - DNA, 17 bp, Homo sapiens
ctcaccgttcatattca

SEQ ID NO: 1277 - DNA, 17 bp, Homo sapiens
tatgtgcacaatcatat

SEQ ID NO: 1278 - DNA, 17 bp, Homo sapiens
gaaggcatctggaataa

SEQ ID NO: 1279 - DNA, 17 bp, Homo sapiens
gggttttaaggctcaag

SEQ ID NO: 1280 - DNA, 17 bp, Homo sapiens
ggttaaatgcagaaaat

SEQ ID NO: 1281 - DNA, 17 bp, Homo sapiens
tgtgcactgggcaggca

SEQ ID NO: 1282 - DNA, 17 bp, Homo sapiens
gtgctatccctgaatga

SEQ ID NO: 1283 - DNA, 17 bp, Homo sapiens
tgagtaactaagagttt

SEQ ID NO: 1284 - DNA, 17 bp, Homo sapiens
aaatgctgcctgtggtt

SEQ ID NO: 1285 - DNA, 17 bp, Homo sapiens
ctctctgactcctctct

SEQ ID NO: 1286 - DNA, 17 bp, Homo sapiens
ttcctgaccctcctttg

SEQ ID NO: 1287 - DNA, 17 bp, Homo sapiens
ccacaagtctctcgcct

SEQ ID NO: 1288 - DNA, 17 bp, Homo sapiens
cctggttctaagtcagt

SEQ ID NO: 1289 - DNA, 17 bp, Homo sapiens
ctaatctactttaaaca

SEQ ID NO: 1290 - DNA, 17 bp, Homo sapiens
atgccaaataaatggat

SEQ ID NO: 1291 - DNA, 17 bp, Homo sapiens
ccagcccacttgagtcc

SEQ ID NO: 1292 - DNA, 17 bp, Homo sapiens
gcccacagatatttcct

SEQ ID NO: 1293 - DNA, 17 bp, Homo sapiens
aagaagactaagaggta

SEQ ID NO: 1294 - DNA, 17 bp, Homo sapiens
gaaggacaatgttgtag

SEQ ID NO: 1295 - DNA, 17 bp, Homo sapiens
catgatggtgaagataa

SEQ ID NO: 1296 - DNA, 17 bp, Homo sapiens
cctcttcttctcatttc

SEQ ID NO: 1297 - DNA, 17 bp, Homo sapiens
cttctcatttcgacacc

SEQ ID NO: 1298 - DNA, 17 bp, Homo sapiens
gtttttaggattcccga

SEQ ID NO: 1299 - DNA, 17 bp, Homo sapiens
gaaattcttccagaatt

SEQ ID NO: 1300 - DNA, 17 bp, Homo sapiens
aaagatgattcctggga

SEQ ID NO: 1301 - DNA, 17 bp, Homo sapiens
agatgattcctgggaga

SEQ ID NO: 1302 - DNA, 17 bp, Homo sapiens
agcatggacgacagcca

SEQ ID NO: 1303 - DNA, 17 bp, Homo sapiens
aagaagattccagagaa

SEQ ID NO: 1304 - DNA, 17 bp, Homo sapiens
caaagtcccactgggcg

SEQ ID NO: 1305 - DNA, 17 bp, Homo sapiens
atgaggatgaccagcat

SEQ ID NO: 1306 - DNA, 17 bp, Homo sapiens
gaggcgggctgcgattt

SEQ ID NO: 1307 - DNA, 17 bp, Homo sapiens
cattgattttttggcag

SEQ ID NO: 1308 - DNA, 17 bp, Homo sapiens
aggaaaaagaaaaaaga

SEQ ID NO: 1309 - DNA, 17 bp, Homo sapiens
agacacaacttcttgtg

SEQ ID NO: 1310 - DNA, 17 bp, Homo sapiens
gggcacatattcagaag

SEQ ID NO: 1311 - DNA, 17 bp, Homo sapiens
ggagagtttcttgtagg

SEQ ID NO: 1312 - DNA, 17 bp, Homo sapiens
tgtattgaaggcgaaaa

SEQ ID NO: 1313 - DNA, 17 bp, Homo sapiens
atgcctcatagaatcct

SEQ ID NO: 1314 - DNA, 17 bp, Homo sapiens
gacgagaaagctgaggg

SEQ ID NO: 1315 - DNA, 17 bp, Homo sapiens
ttcaagcttggcagtct

SEQ ID NO: 1316 - DNA, 17 bp, Homo sapiens
tcatttgccttcttaga

SEQ ID NO: 1317 - DNA, 17 bp, Homo sapiens
gctgtcttctcagctct

SEQ ID NO: 1318 - DNA, 17 bp, Homo sapiens
tgcttactggtttgaag

SEQ ID NO: 1319 - DNA, 17 bp, Homo sapiens
tgaagggcaacaaaata

SEQ ID NO: 1320 - DNA, 17 bp, Homo sapiens
cccatagttaaaactct

SEQ ID NO: 1321 - DNA, 17 bp, Homo sapiens
atagttaaaactcttta

SEQ ID NO: 1322 - DNA, 17 bp, Homo sapiens
gacaacaggttgtttcc

SEQ ID NO: 1323 - DNA, 17 bp, Homo sapiens
ggttgtttccgtttaca

SEQ ID NO: 1324 - DNA, 17 bp, Homo sapiens
gggagagtggagaaaaa

SEQ ID NO: 1325 - DNA, 17 bp, Homo sapiens
gagagtggagaaaaagg

SEQ ID NO: 1326 - DNA, 17 bp, Homo sapiens
tgaagtccaggatcccc

SEQ ID NO: 1327 - DNA, 17 bp, Homo sapiens
tgaaaagccctgtgatc

SEQ ID NO: 1328 - DNA, 17 bp, Homo sapiens
tccaagaagcaaatgat

SEQ ID NO: 1329 - DNA, 17 bp, Homo sapiens
gcaaatgatttgtacaa

SEQ ID NO: 1330 - DNA, 17 bp, Homo sapiens
acaagatcacagggctt

SEQ ID NO: 1331 - DNA, 17 bp, Homo sapiens
tagagggggatcctgga

SEQ ID NO: 1332 - DNA, 17 bp, Homo sapiens
ccctatcccaccccaac

SEQ ID NO: 1333 - DNA, 17 bp, Homo sapiens
ctatcccaccccaaccc

SEQ ID NO: 1334 - DNA, 17 bp, Homo sapiens
tattgttctctgtaaac

SEQ ID NO: 1335 - DNA, 17 bp, Homo sapiens
atgggctcacgggtgag

SEQ ID NO: 1336 - DNA, 17 bp, Homo sapiens
agtaagcatttatgagg

SEQ ID NO: 1337 - DNA, 17 bp, Homo sapiens
aggactcacactatgcc

SEQ ID NO: 1338 - DNA, 17 bp, Homo sapiens
tgaagctatgagaaatt

SEQ ID NO: 1339 - DNA, 17 bp, Homo sapiens
ctatgagaaattttcca

SEQ ID NO: 1340 - DNA, 17 bp, Homo sapiens
ttctttatgactatact

SEQ ID NO: 1341 - DNA, 17 bp, Homo sapiens
aagctctcttggcggtt

SEQ ID NO: 1342 - DNA, 17 bp, Homo sapiens
attgtcagcagagctga

SEQ ID NO: 1343 - DNA, 17 bp, Homo sapiens
gcagagagctactcccg

SEQ ID NO: 1344 - DNA, 17 bp, Homo sapiens
agaaggcaaatgagacc

SEQ ID NO: 1345 - DNA, 17 bp, Homo sapiens
aaattacgtgcccccaa

SEQ ID NO: 1346 - DNA, 17 bp, Homo sapiens
gtctgggtattgggctg

SEQ ID NO: 1347 - DNA, 17 bp, Homo sapiens
catccacggccagcatc

SEQ ID NO: 1348 - DNA, 17 bp, Homo sapiens
cacatactatgcactca

SEQ ID NO: 1349 - DNA, 17 bp, Homo sapiens
agatgctggccgtggat

SEQ ID NO: 1350 - DNA, 17 bp, Homo sapiens
gcctctgtaggattggg

SEQ ID NO: 1351 - DNA, 17 bp, Homo sapiens
cgtaattttgctgtttg

SEQ ID NO: 1352 - DNA, 17 bp, Homo sapiens
tttattctagagccaag

SEQ ID NO: 1353 - DNA, 17 bp, Homo sapiens
ctagagccaaggtcacg

SEQ ID NO: 1354 - DNA, 17 bp, Homo sapiens
acttgagattttcagat

SEQ ID NO: 1355 - DNA, 17 bp, Homo sapiens
tatagtatagtcataaa

SEQ ID NO: 1356 - DNA, 17 bp, Homo sapiens
gtggaaaatttctcata

SEQ ID NO: 1357 - DNA, 17 bp, Homo sapiens
ctggagtgaagaatcct

SEQ ID NO: 1358 - DNA, 17 bp, Homo sapiens
gcttactggtttgaagg

SEQ ID NO: 1359 - DNA, 17 bp, Homo sapiens
tccccactaagatcctg

SEQ ID NO: 1360 - DNA, 17 bp, Homo sapiens
ggagagtggagaaaaag

SEQ ID NO: 1361 - DNA, 17 bp, Homo sapiens
aagaaattactatccaa

SEQ ID NO: 1362 - DNA, 17 bp, Homo sapiens
accccaacccccacaca

SEQ ID NO: 1363 - DNA, 17 bp, Homo sapiens
acgggtgagctaaacag

SEQ ID NO: 1364 - DNA, 17 bp, Homo sapiens
atctttttctggaccca

SEQ ID NO: 1365 - DNA, 17 bp, Homo sapiens
cagtaagcatttatgag

SEQ ID NO: 1366 - DNA, 17 bp, Homo sapiens
ggactcacactatgcca

SEQ ID NO: 1367 - DNA, 17 bp, Homo sapiens
agcagagagctactccc

SEQ ID NO: 1368 - DNA, 17 bp, Homo sapiens
tctaagaaggcaaatga

SEQ ID NO: 1369 - DNA, 17 bp, Homo sapiens
aaacagcaaaattacgt

SEQ ID NO: 1370 - DNA, 17 bp, Homo sapiens
gtgcccccaatcctaca

SEQ ID NO: 1371 - DNA, 17 bp, Homo sapiens
agaggcagactaaccca

SEQ ID NO: 1372 - DNA, 17 bp, Homo sapiens
tcatctttggttttgtg

SEQ ID NO: 1373 - DNA, 17 bp, Homo sapiens
aaaggctgaagagcatg

SEQ ID NO: 1374 - DNA, 17 bp, Homo sapiens
gcccagtgggactttgg

SEQ ID NO: 1375 - DNA, 17 bp, Homo sapiens
aatacaatgtgtcaact

SEQ ID NO: 1376 - DNA, 17 bp, Homo sapiens
atcttcttcatcatcct

SEQ ID NO: 1377 - DNA, 17 bp, Homo sapiens
acggtcacctttggggt

SEQ ID NO: 1378 - DNA, 17 bp, Homo sapiens
ctcaaaaagaaggtctt

SEQ ID NO: 1379 - DNA, 17 bp, Homo sapiens
cctgcagctctcatttt

SEQ ID NO: 1380 - DNA, 17 bp, Homo sapiens
caattctggaagaattt

SEQ ID NO: 1381 - DNA, 17 bp, Homo sapiens
gtcgaaatgagaagaag

SEQ ID NO: 1382 - DNA, 17 bp, Homo sapiens
attttctcttctgggct

SEQ ID NO: 1383 - DNA, 17 bp, Homo sapiens
ttctcttctgggctccc

SEQ ID NO: 1384 - DNA, 17 bp, Homo sapiens
acaacattgtccttctc

SEQ ID NO: 1385 - DNA, 17 bp, Homo sapiens
tgaataattgcagtagc

SEQ ID NO: 1386 - DNA, 17 bp, Homo sapiens
ttggaccaagctatgca

SEQ ID NO: 1387 - DNA, 17 bp, Homo sapiens
tcttagtcttcttccaa

SEQ ID NO: 1388 - DNA, 17 bp, Homo sapiens
ccgagcgagcaagctca

SEQ ID NO: 1389 - DNA, 17 bp, Homo sapiens
ggaaatatctgtgggct

SEQ ID NO: 1390 - DNA, 17 bp, Homo sapiens
gtgacccagtcagagtt

SEQ ID NO: 1391 - DNA, 17 bp, Homo sapiens
tgcacatggcttagttt

SEQ ID NO: 1392 - DNA, 17 bp, Homo sapiens
cacatggcttagttttc

SEQ ID NO: 1393 - DNA, 17 bp, Homo sapiens
tatgaaaactaagccat

SEQ ID NO: 1394 - DNA, 17 bp, Homo sapiens
cagcccacttgagtccg

SEQ ID NO: 1395 - DNA, 17 bp, Homo sapiens
ttgagtccgtgtcacaa

SEQ ID NO: 1396 - DNA, 17 bp, Homo sapiens
agcctcttgctggaaaa

SEQ ID NO: 1397 - DNA, 17 bp, Homo sapiens
tagtttctgaacttctc

SEQ ID NO: 1398 - DNA, 17 bp, Homo sapiens
tggaaggtgttcaggag

SEQ ID NO: 1399 - DNA, 17 bp, Homo sapiens
ggagcccagaagagaaa

SEQ ID NO: 1400 - DNA, 17 bp, Homo sapiens
atgatggtgaagataag

SEQ ID NO: 1401 - DNA, 17 bp, Homo sapiens
gtgcctcttcttctcat

SEQ ID NO: 1402 - DNA, 17 bp, Homo sapiens
cccgagtagcagatgac

SEQ ID NO: 1403 - DNA, 17 bp, Homo sapiens
tgattcctgggagagac

SEQ ID NO: 1404 - DNA, 17 bp, Homo sapiens
attcctgggagagacgc

SEQ ID NO: 1405 - DNA, 17 bp, Homo sapiens
acagccaccacccaagt

SEQ ID NO: 1406 - DNA, 17 bp, Homo sapiens
ccgtcctggcttttaaa

SEQ ID NO: 1407 - DNA, 17 bp, Homo sapiens
gtcctggcttttaaagc

SEQ ID NO: 1408 - DNA, 17 bp, Homo sapiens
aaagcaaacacagcatg

SEQ ID NO: 1409 - DNA, 17 bp, Homo sapiens
atagagccctgtcaaga

SEQ ID NO: 1410 - DNA, 17 bp, Homo sapiens
agagccctgtcaagagt

SEQ ID NO: 1411 - DNA, 17 bp, Homo sapiens
gcatagtgagcccagaa

SEQ ID NO: 1412 - DNA, 17 bp, Homo sapiens
aggggacagtaagaagg

SEQ ID NO: 1413 - DNA, 17 bp, Homo sapiens
aggatgaccagcatgtt

SEQ ID NO: 1414 - DNA, 17 bp, Homo sapiens
tgcccacaaaaccaaag

SEQ ID NO: 1415 - DNA, 17 bp, Homo sapiens
aggcgggctgcgatttg

SEQ ID NO: 1416 - DNA, 17 bp, Homo sapiens
tgccaaaaaatcaatgt

SEQ ID NO: 1417 - DNA, 17 bp, Homo sapiens
tctgggctcactatgct

SEQ ID NO: 1418 - DNA, 17 bp, Homo sapiens
ggtcatctgctactcgg

SEQ ID NO: 1419 - DNA, 17 bp, Homo sapiens
ctaaaaactctgcttcg

SEQ ID NO: 1420 - DNA, 17 bp, Homo sapiens
tgtcgaaatgagaagaa

SEQ ID NO: 1421 - DNA, 17 bp, Homo sapiens
aagaggcacagggctgt

SEQ ID NO: 1422 - DNA, 17 bp, Homo sapiens
tttattttctcttctgg

SEQ ID NO: 1423 - DNA, 17 bp, Homo sapiens
tggaccaagctatgcag

SEQ ID NO: 1424 - DNA, 17 bp, Homo sapiens
ctattttccagcaagag

SEQ ID NO: 1425 - DNA, 17 bp, Homo sapiens
aatatctgtgggcttgt

SEQ ID NO: 1426 - DNA, 17 bp, Homo sapiens
cggactcaagtgggctg

SEQ ID NO: 1427 - DNA, 17 bp, Homo sapiens
ccagcccacttgagtcc

SEQ ID NO: 1428 - DNA, 17 bp, Homo sapiens
gcccacagatatttcct

SEQ ID NO: 1429 - DNA, 17 bp, Homo sapiens
aagaagactaagaggta

SEQ ID NO: 1430 - DNA, 17 bp, Homo sapiens
gaaggacaatgttgtag

SEQ ID NO: 1431 - DNA, 17 bp, Homo sapiens
catgatggtgaagataa

SEQ ID NO: 1432 - DNA, 17 bp, Homo sapiens
cctcttcttctcatttc

SEQ ID NO: 1433 - DNA, 17 bp, Homo sapiens
cttctcatttcgacacc

SEQ ID NO: 1434 - DNA, 17 bp, Homo sapiens
gtttttaggattcccga

SEQ ID NO: 1435 - DNA, 17 bp, Homo sapiens
gaaattcttccagaatt

SEQ ID NO: 1436 - DNA, 17 bp, Homo sapiens
aaagatgattcctggga

SEQ ID NO: 1437 - DNA, 17 bp, Homo sapiens
agatgattcctgggaga

SEQ ID NO: 1438 - DNA, 17 bp, Homo sapiens
agcatggacgacagcca

SEQ ID NO: 1439 - DNA, 17 bp, Homo sapiens
aagaagattccagagaa

SEQ ID NO: 1440 - DNA, 17 bp, Homo sapiens
caaagtcccactgggcg

SEQ ID NO: 1441 - DNA, 17 bp, Homo sapiens
atgaggatgaccagcat

SEQ ID NO: 1442 - DNA, 17 bp, Homo sapiens
gaggcgggctgcgattt

SEQ ID NO: 1443 - DNA, 17 bp, Homo sapiens
cattgattttttggcag

SEQ ID NO: 1444 - DNA, 17 bp, Homo sapiens
aaaagccatgacggctc

SEQ ID NO: 1445 - DNA, 17 bp, Homo sapiens
ggcgcgcggcggtgtga

SEQ ID NO: 1446 - DNA, 17 bp, Homo sapiens
gatgcagtgggggctca

SEQ ID NO: 1447 - DNA, 17 bp, Homo sapiens
ggacagaccggggcgcg

SEQ ID NO: 1448 - DNA, 17 bp, Homo sapiens
tgtgcttttgtttctcc

SEQ ID NO: 1449 - DNA, 17 bp, Homo sapiens
gagcctcttgaagccat

SEQ ID NO: 1450 - DNA, 17 bp, Homo sapiens
agatgaacttcccattg

SEQ ID NO: 1451 - DNA, 17 bp, Homo sapiens
acattcttatttttatc

SEQ ID NO: 1452 - DNA, 17 bp, Homo sapiens
ttttatcgagcacaaac

SEQ ID NO: 1453 - DNA, 17 bp, Homo sapiens
atctagaggaatttgcc

SEQ ID NO: 1454 - DNA, 17 bp, Homo sapiens
aggaatttgccccaaac

SEQ ID NO: 1455 - DNA, 17 bp, Homo sapiens
gaatttgccccaaacag

SEQ ID NO: 1456 - DNA, 17 bp, Homo sapiens
agtgtatttcttgaatc

SEQ ID NO: 1457 - DNA, 17 bp, Homo sapiens
ccaccacatttacctta

SEQ ID NO: 1458 - DNA, 17 bp, Homo sapiens
ttgtgactggaaggaaa

SEQ ID NO: 1459 - DNA, 17 bp, Homo sapiens
taaatcaccaaatatgg

SEQ ID NO: 1460 - DNA, 17 bp, Homo sapiens
gagtaacacttgcgtga

SEQ ID NO: 1461 - DNA, 17 bp, Homo sapiens
gcgtgatgtaacatcgt

SEQ ID NO: 1462 - DNA, 17 bp, Homo sapiens
atcgagctgctcgttta

SEQ ID NO: 1463 - DNA, 17 bp, Homo sapiens
gctgctcgtttaaaaga

SEQ ID NO: 1464 - DNA, 17 bp, Homo sapiens
tgctcgtttaaaagaca

SEQ ID NO: 1465 - DNA, 17 bp, Homo sapiens
tgtcaagcaagaattaa

SEQ ID NO: 1466 - DNA, 17 bp, Homo sapiens
gctcttaaaagtaaatc

SEQ ID NO: 1467 - DNA, 17 bp, Homo sapiens
agcagttcaaatgaaat

SEQ ID NO: 1468 - DNA, 17 bp, Homo sapiens
gcagtggagcggtaagc

SEQ ID NO: 1469 - DNA, 17 bp, Homo sapiens
gttattctcagtctgac

SEQ ID NO: 1470 - DNA, 17 bp, Homo sapiens
caccagctgagatagga

SEQ ID NO: 1471 - DNA, 17 bp, Homo sapiens
tttcttcagcggtgcca

SEQ ID NO: 1472 - DNA, 17 bp, Homo sapiens
ggcaggaagctctggtg

SEQ ID NO: 1473 - DNA, 17 bp, Homo sapiens
atcaagtgagggtcctg

SEQ ID NO: 1474 - DNA, 17 bp, Homo sapiens
gaggttcgttgcagatg

SEQ ID NO: 1475 - DNA, 17 bp, Homo sapiens
ggttcgttgcagatgga

SEQ ID NO: 1476 - DNA, 17 bp, Homo sapiens
cctttcaaattggccag

SEQ ID NO: 1477 - DNA, 17 bp, Homo sapiens
gggaggctgttcagatc

SEQ ID NO: 1478 - DNA, 17 bp, Homo sapiens
atcacaaagaagttgtc

SEQ ID NO: 1479 - DNA, 17 bp, Homo sapiens
ctctatggtgctggctt

SEQ ID NO: 1480 - DNA, 17 bp, Homo sapiens
gctggctttgccacatg

SEQ ID NO: 1481 - DNA, 17 bp, Homo sapiens
aggagaccctcagggaa

SEQ ID NO: 1482 - DNA, 17 bp, Homo sapiens
cctttgcctgccaaatg

SEQ ID NO: 1483 - DNA, 17 bp, Homo sapiens
gaaagcaaagtcctctt

SEQ ID NO: 1484 - DNA, 17 bp, Homo sapiens
ggaaaagtccagtgcag

SEQ ID NO: 1485 - DNA, 17 bp, Homo sapiens
gagggagctacagtaga

SEQ ID NO: 1486 - DNA, 17 bp, Homo sapiens
ctacagtagagcagaca

SEQ ID NO: 1487 - DNA, 17 bp, Homo sapiens
agtagagcagacaggag

SEQ ID NO: 1488 - DNA, 17 bp, Homo sapiens
acaaacaccagctaaga

SEQ ID NO: 1489 - DNA, 17 bp, Homo sapiens
tctagcagcttccggag

SEQ ID NO: 1490 - DNA, 17 bp, Homo sapiens
atggattaggaggaaga

SEQ ID NO: 1491 - DNA, 17 bp, Homo sapiens
agagtaccaggcagctt

SEQ ID NO: 1492 - DNA, 17 bp, Homo sapiens
cttaggaacatgtctcc

SEQ ID NO: 1493 - DNA, 17 bp, Homo sapiens
ggtgctgcccagagctg

SEQ ID NO: 1494 - DNA, 17 bp, Homo sapiens
tcatgttcctgggcctc

SEQ ID NO: 1495 - DNA, 17 bp, Homo sapiens
gctagccctggcccgtg

SEQ ID NO: 1496 - DNA, 17 bp, Homo sapiens
tcggtgaggagagaggg

SEQ ID NO: 1497 - DNA, 17 bp, Homo sapiens
tctttgagcaggaaaag

SEQ ID NO: 1498 - DNA, 17 bp, Homo sapiens
gaagctccaaactctca

SEQ ID NO: 1499 - DNA, 17 bp, Homo sapiens
aactctcaaaccacagg

SEQ ID NO: 1500 - DNA, 17 bp, Homo sapiens
tctcaaaccacagggat

SEQ ID NO: 1501 - DNA, 17 bp, Homo sapiens
tcaaaccacagggatca

SEQ ID NO: 1502 - DNA, 17 bp, Homo sapiens
atgacgttatatgtaag

SEQ ID NO: 1503 - DNA, 17 bp, Homo sapiens
acgttatatgtaagcat

SEQ ID NO: 1504 - DNA, 17 bp, Homo sapiens
gtctgcaccccaccctg

SEQ ID NO: 1505 - DNA, 17 bp, Homo sapiens
gcttgattttgggtttc

SEQ ID NO: 1506 - DNA, 17 bp, Homo sapiens
cctctcctcccctcgtt

SEQ ID NO: 1507 - DNA, 17 bp, Homo sapiens
aagttgagccttatttc

SEQ ID NO: 1508 - DNA, 17 bp, Homo sapiens
gcagggaaggctggagg

SEQ ID NO: 1509 - DNA, 17 bp, Homo sapiens
gatgcccgcctcagtga

SEQ ID NO: 1510 - DNA, 17 bp, Homo sapiens
gtaaagatgagcccagc

SEQ ID NO: 1511 - DNA, 17 bp, Homo sapiens
aaagatgagcccagcag

SEQ ID NO: 1512 - DNA, 17 bp, Homo sapiens
gagcccagcagctacac

SEQ ID NO: 1513 - DNA, 17 bp, Homo sapiens
ctacacatgtacaactt

SEQ ID NO: 1514 - DNA, 17 bp, Homo sapiens
cagtgcatggtttctct

SEQ ID NO: 1515 - DNA, 17 bp, Homo sapiens
atggtttctcttgcaac

SEQ ID NO: 1516 - DNA, 17 bp, Homo sapiens
ttctcttgcaacacgca

SEQ ID NO: 1517 - DNA, 17 bp, Homo sapiens
aagaatctacttagaaa

SEQ ID NO: 1518 - DNA, 17 bp, Homo sapiens
tccatgggattcatatt

SEQ ID NO: 1519 - DNA, 17 bp, Homo sapiens
cctgtttagtccaccac

SEQ ID NO: 1520 - DNA, 17 bp, Homo sapiens
cccatcacccgagtgcc

SEQ ID NO: 1521 - DNA, 17 bp, Homo sapiens
gacttagagagctggca

SEQ ID NO: 1522 - DNA, 17 bp, Homo sapiens
tggtggtgcaccggcgc

SEQ ID NO: 1523 - DNA, 17 bp, Homo sapiens
gccacacgggcgagaag

SEQ ID NO: 1524 - DNA, 17 bp, Homo sapiens
aggccagcaagctgaag

SEQ ID NO: 1525 - DNA, 17 bp, Homo sapiens
tgaagcgccacatgaag

SEQ ID NO: 1526 - DNA, 17 bp, Homo sapiens
gccacatgaagacgcac

SEQ ID NO: 1527 - DNA, 17 bp, Homo sapiens
aggcggcgcgccaccac

SEQ ID NO: 1528 - DNA, 17 bp, Homo sapiens
acctggccgaggccgag

SEQ ID NO: 1529 - DNA, 17 bp, Homo sapiens
ccgaggccgagggccac

SEQ ID NO: 1530 - DNA, 17 bp, Homo sapiens
tgcccccggccgcgatg

SEQ ID NO: 1531 - DNA, 17 bp, Homo sapiens
ccttagcttcggagact

SEQ ID NO: 1532 - DNA, 17 bp, Homo sapiens
aacgggagtttgcgctt

SEQ ID NO: 1533 - DNA, 17 bp, Homo sapiens
caaaagagggcagacgc

SEQ ID NO: 1534 - DNA, 17 bp, Homo sapiens
actgtagcaatctcact

SEQ ID NO: 1535 - DNA, 17 bp, Homo sapiens
tcactgtccacaggaga

SEQ ID NO: 1536 - DNA, 17 bp, Homo sapiens
agagtagcaagctcacc

SEQ ID NO: 1537 - DNA, 17 bp, Homo sapiens
gccaggtggggaaggac

SEQ ID NO: 1538 - DNA, 17 bp, Homo sapiens
gtaagatgccttttagc

SEQ ID NO: 1539 - DNA, 17 bp, Homo sapiens
cgtgtacagtaccctgg

SEQ ID NO: 1540 - DNA, 17 bp, Homo sapiens
tgtacagtaccctggag

SEQ ID NO: 1541 - DNA, 17 bp, Homo sapiens
agaaacacatgaaaaaa

SEQ ID NO: 1542 - DNA, 17 bp, Homo sapiens
cccctccctcactccca

SEQ ID NO: 1543 - DNA, 17 bp, Homo sapiens
ttctagtcccatgtgat

SEQ ID NO: 1544 - DNA, 17 bp, Homo sapiens
agtcccatgtgatttaa

SEQ ID NO: 1545 - DNA, 17 bp, Homo sapiens
ccatgtgatttaaacaa

SEQ ID NO: 1546 - DNA, 17 bp, Homo sapiens
gtgatttaaacaaacaa

SEQ ID NO: 1547 - DNA, 17 bp, Homo sapiens
tttaaacaaacaaacaa

SEQ ID NO: 1548 - DNA, 17 bp, Homo sapiens
atgagagtgcttgtcac

SEQ ID NO: 1549 - DNA, 17 bp, Homo sapiens
ctttctcttgtgcaata

SEQ ID NO: 1550 - DNA, 17 bp, Homo sapiens
tatgtttttttttaaac

SEQ ID NO: 1551 - DNA, 17 bp, Homo sapiens
ccctaattcgttgctga

SEQ ID NO: 1552 - DNA, 17 bp, Homo sapiens
gagaaaaagaccatgct

SEQ ID NO: 1553 - DNA, 17 bp, Homo sapiens
atgctgcatacattctg

SEQ ID NO: 1554 - DNA, 17 bp, Homo sapiens
attctgtaatacatatc

SEQ ID NO: 1555 - DNA, 17 bp, Homo sapiens
tttataacgtgaggagg

SEQ ID NO: 1556 - DNA, 17 bp, Homo sapiens
ctttggattaaccctct

SEQ ID NO: 1557 - DNA, 17 bp, Homo sapiens
aagaaaaaaggccttga

SEQ ID NO: 1558 - DNA, 17 bp, Homo sapiens
aggccttgaattgacaa

SEQ ID NO: 1559 - DNA, 17 bp, Homo sapiens
aattgacaaattaacag

SEQ ID NO: 1560 - DNA, 17 bp, Homo sapiens
acaaattaacagaaaaa

SEQ ID NO: 1561 - DNA, 17 bp, Homo sapiens
tgccttggatctattaa

SEQ ID NO: 1562 - DNA, 17 bp, Homo sapiens
taattctatattgtatt

SEQ ID NO: 1563 - DNA, 17 bp, Homo sapiens
ttctatattgtatttct

SEQ ID NO: 1564 - DNA, 17 bp, Homo sapiens
tcctttagtttaatttt

SEQ ID NO: 1565 - DNA, 17 bp, Homo sapiens
ccaaagttttatttttt

SEQ ID NO: 1566 - DNA, 17 bp, Homo sapiens
agccctggaacgcaatt

SEQ ID NO: 1567 - DNA, 17 bp, Homo sapiens
atctacttggttgtcaa

SEQ ID NO: 1568 - DNA, 17 bp, Homo sapiens
catattgaaaggaagag

SEQ ID NO: 1569 - DNA, 17 bp, Homo sapiens
agaggctgacaataagg

SEQ ID NO: 1570 - DNA, 17 bp, Homo sapiens
aataaggtttgacagag

SEQ ID NO: 1571 - DNA, 17 bp, Homo sapiens
aaaataatatgatttat

SEQ ID NO: 1572 - DNA, 17 bp, Homo sapiens
tatttgccatttaaaac

SEQ ID NO: 1573 - DNA, 17 bp, Homo sapiens
ggtatataagctaatat

SEQ ID NO: 1574 - DNA, 17 bp, Homo sapiens
taagacttgcatttaaa

SEQ ID NO: 1575 - DNA, 17 bp, Homo sapiens
tgtacttcatttctttt

SEQ ID NO: 1576 - DNA, 17 bp, Homo sapiens
cactgtgtgctatttgt

SEQ ID NO: 1577 - DNA, 17 bp, Homo sapiens
atcttttctctaatcag

SEQ ID NO: 1578 - DNA, 17 bp, Homo sapiens
aaataaacctgctcaga

SEQ ID NO: 1579 - DNA, 17 bp, Homo sapiens
taggacaattaagtgca

SEQ ID NO: 1580 - DNA, 17 bp, Homo sapiens
actgtacaattttccca

SEQ ID NO: 1581 - DNA, 17 bp, Homo sapiens
agaatgctgaaaaaaaa

SEQ ID NO: 1582 - DNA, 17 bp, Homo sapiens
aatgctgaaaaaaaatt

SEQ ID NO: 1583 - DNA, 17 bp, Homo sapiens
gagcttacttacttgga

SEQ ID NO: 1584 - DNA, 17 bp, Homo sapiens
ttgcaagcgctgtgaat

SEQ ID NO: 1585 - DNA, 17 bp, Homo sapiens
cgctgtgaatggaaaca

SEQ ID NO: 1586 - DNA, 17 bp, Homo sapiens
aatggaaacagaataca

SEQ ID NO: 1587 - DNA, 17 bp, Homo sapiens
tgaatgattgctttcgc

SEQ ID NO: 1588 - DNA, 17 bp, Homo sapiens
acagtgcaaggattttt

SEQ ID NO: 1589 - DNA, 17 bp, Homo sapiens
aagaaaaatttttttta

SEQ ID NO: 1590 - DNA, 17 bp, Homo sapiens
ttccattgtcttggtgg

SEQ ID NO: 1591 - DNA, 17 bp, Homo sapiens
tggaaattctatgcctt

SEQ ID NO: 1592 - DNA, 17 bp, Homo sapiens
gaaattctatgccttgg

SEQ ID NO: 1593 - DNA, 17 bp, Homo sapiens
ttcaggttgtaaaaaaa

SEQ ID NO: 1594 - DNA, 17 bp, Homo sapiens
ggttgtaaaaaaaaaaa

SEQ ID NO: 1595 - DNA, 17 bp, Homo sapiens
tacttaaatataggaaa

SEQ ID NO: 1596 - DNA, 17 bp, Homo sapiens
tgttgattcctatgcta

SEQ ID NO: 1597 - DNA, 17 bp, Homo sapiens
ttggtagtggaaaaaaa

SEQ ID NO: 1598 - DNA, 17 bp, Homo sapiens
aaaaaaaaaagacaggc

SEQ ID NO: 1599 - DNA, 17 bp, Homo sapiens
aaaaaaaaaaaaaagag

SEQ ID NO: 1600 - DNA, 17 bp, Homo sapiens
agagagaaacaaaaaag

SEQ ID NO: 1601 - DNA, 17 bp, Homo sapiens
gaaacaaaaaagtgtga

SEQ ID NO: 1602 - DNA, 17 bp, Homo sapiens
gggggagcctgctagaa

SEQ ID NO: 1603 - DNA, 17 bp, Homo sapiens
gatggctgtcatagggg

SEQ ID NO: 1604 - DNA, 17 bp, Homo sapiens
tccctttccttctatca

SEQ ID NO: 1605 - DNA, 17 bp, Homo sapiens
tgcttatgtgccctgtt

SEQ ID NO: 1606 - DNA, 17 bp, Homo sapiens
tttagatgaccaaaggt

SEQ ID NO: 1607 - DNA, 17 bp, Homo sapiens
tgtctgcattaacctgt

SEQ ID NO: 1608 - DNA, 17 bp, Homo sapiens
aaaaataaaaaaaatta

SEQ ID NO: 1609 - DNA, 17 bp, Homo sapiens
aaataaaaaaaattaaa

SEQ ID NO: 1610 - DNA, 17 bp, Homo sapiens
agcttcttgtgtcctca

SEQ ID NO: 1611 - DNA, 17 bp, Homo sapiens
cttcttgtgtcctcatt

SEQ ID NO: 1612 - DNA, 17 bp, Homo sapiens
taaattacttgcaagaa

SEQ ID NO: 1613 - DNA, 17 bp, Homo sapiens
ttttaaaaagctagtta

SEQ ID NO: 1614 - DNA, 17 bp, Homo sapiens
agaaaatcattgggcca

SEQ ID NO: 1615 - DNA, 17 bp, Homo sapiens
caacctctttctaggtt

SEQ ID NO: 1616 - DNA, 17 bp, Homo sapiens
acctctttctaggttct

SEQ ID NO: 1617 - DNA, 17 bp, Homo sapiens
gctagtttgtgatgttt

SEQ ID NO: 1618 - DNA, 17 bp, Homo sapiens
ccaagaagccgttgtgc

SEQ ID NO: 1619 - DNA, 17 bp, Homo sapiens
attttttaataaaaagt

SEQ ID NO: 1620 - DNA, 17 bp, Homo sapiens
ataaaaagtaaaaacaa

SEQ ID NO: 1621 - DNA, 17 bp, Homo sapiens
taaaaacaaaaaaacag

SEQ ID NO: 1622 - DNA, 17 bp, Homo sapiens
aaaaaacagacccacat

SEQ ID NO: 1623 - DNA, 17 bp, Homo sapiens
tccccaaccccttgttt

SEQ ID NO: 1624 - DNA, 17 bp, Homo sapiens
gtcttttaaaaagtgtg

SEQ ID NO: 1625 - DNA, 17 bp, Homo sapiens
taaaaagtgtgcttaac

SEQ ID NO: 1626 - DNA, 17 bp, Homo sapiens
aaaagtgtgcttaacat

SEQ ID NO: 1627 - DNA, 17 bp, Homo sapiens
ttaatttttaatgctta

SEQ ID NO: 1628 - DNA, 17 bp, Homo sapiens
gtacttctgtacctgtt

SEQ ID NO: 1629 - DNA, 17 bp, Homo sapiens
ttctgtacctgtttcct

SEQ ID NO: 1630 - DNA, 17 bp, Homo sapiens
cccatcgggtgggtagg

SEQ ID NO: 1631 - DNA, 17 bp, Homo sapiens
tttaatttagcttagga

SEQ ID NO: 1632 - DNA, 17 bp, Homo sapiens
aggaaatatatcttaat

SEQ ID NO: 1633 - DNA, 17 bp, Homo sapiens
aatatatcttaatgcag

SEQ ID NO: 1634 - DNA, 17 bp, Homo sapiens
tatcttaatgcagacaa

SEQ ID NO: 1635 - DNA, 17 bp, Homo sapiens
cataaaacttctttagt

SEQ ID NO: 1636 - DNA, 17 bp, Homo sapiens
attataggaggaaagaa

SEQ ID NO: 1637 - DNA, 17 bp, Homo sapiens
aggaaagaagttcacat

SEQ ID NO: 1638 - DNA, 17 bp, Homo sapiens
aagaagttcacatcaga

SEQ ID NO: 1639 - DNA, 17 bp, Homo sapiens
ttcacatcagaacagac

SEQ ID NO: 1640 - DNA, 17 bp, Homo sapiens
tattccttagaaattag

SEQ ID NO: 1641 - DNA, 17 bp, Homo sapiens
aattagtgccacaaata

SEQ ID NO: 1642 - DNA, 17 bp, Homo sapiens
tgccacaaataagttac

SEQ ID NO: 1643 - DNA, 17 bp, Homo sapiens
acaaataagttacatct

SEQ ID NO: 1644 - DNA, 17 bp, Homo sapiens
tttctggcccagttaat

SEQ ID NO: 1645 - DNA, 17 bp, Homo sapiens
agatccagaagagaatt

SEQ ID NO: 1646 - DNA, 17 bp, Homo sapiens
tccagaagagaattaga

SEQ ID NO: 1647 - DNA, 17 bp, Homo sapiens
tttgtcaataatagagc

SEQ ID NO: 1648 - DNA, 17 bp, Homo sapiens
acacctgtgtgctgtag

SEQ ID NO: 1649 - DNA, 17 bp, Homo sapiens
ctgtgtgctgtagattc

SEQ ID NO: 1650 - DNA, 17 bp, Homo sapiens
cataataaataatgact

SEQ ID NO: 1651 - DNA, 17 bp, Homo sapiens
gtgaactaccttatact

SEQ ID NO: 1652 - DNA, 17 bp, Homo sapiens
ttatttcacctgctctc

SEQ ID NO: 1653 - DNA, 17 bp, Homo sapiens
gcaggtgaaataatgca

SEQ ID NO: 1654 - DNA, 17 bp, Homo sapiens
atgcacgagacagcact

SEQ ID NO: 1655 - DNA, 17 bp, Homo sapiens
taaggtagttcactact

SEQ ID NO: 1656 - DNA, 17 bp, Homo sapiens
tgaataagcaggaaata

SEQ ID NO: 1657 - DNA, 17 bp, Homo sapiens
tcacggcctgtatgtga

SEQ ID NO: 1658 - DNA, 17 bp, Homo sapiens
gcctgtatgtgaatcta

SEQ ID NO: 1659 - DNA, 17 bp, Homo sapiens
ctgtatgtgaatctaca

SEQ ID NO: 1660 - DNA, 17 bp, Homo sapiens
ggtgtctgagctctatt

SEQ ID NO: 1661 - DNA, 17 bp, Homo sapiens
atatttaataagaaact

SEQ ID NO: 1662 - DNA, 17 bp, Homo sapiens
tttcctaagctaaatta

SEQ ID NO: 1663 - DNA, 17 bp, Homo sapiens
ccaaaagcatatatttg

SEQ ID NO: 1664 - DNA, 17 bp, Homo sapiens
ggtatgcaaattataag

SEQ ID NO: 1665 - DNA, 17 bp, Homo sapiens
agtcagacagttaggaa

SEQ ID NO: 1666 - DNA, 17 bp, Homo sapiens
accacacttcagcatta

SEQ ID NO: 1667 - DNA, 17 bp, Homo sapiens
ataaacagcaatattac

SEQ ID NO: 1668 - DNA, 17 bp, Homo sapiens
cggtaacctagttcccc

SEQ ID NO: 1669 - DNA, 17 bp, Homo sapiens
cccgatgggtgtctgta

SEQ ID NO: 1670 - DNA, 17 bp, Homo sapiens
gggtgtctgtaggaaac

SEQ ID NO: 1671 - DNA, 17 bp, Homo sapiens
gtaggaaacaggtacag

SEQ ID NO: 1672 - DNA, 17 bp, Homo sapiens
ataagcattaaaaatta

SEQ ID NO: 1673 - DNA, 17 bp, Homo sapiens
taaaaattaaagaacaa

SEQ ID NO: 1674 - DNA, 17 bp, Homo sapiens
caaacaccacctaaagc

SEQ ID NO: 1675 - DNA, 17 bp, Homo sapiens
tttattgtgtcaatgtt

SEQ ID NO: 1676 - DNA, 17 bp, Homo sapiens
gttaagcacacttttta

SEQ ID NO: 1677 - DNA, 17 bp, Homo sapiens
aagcacactttttaaaa

SEQ ID NO: 1678 - DNA, 17 bp, Homo sapiens
gacaacatagaatgtat

SEQ ID NO: 1679 - DNA, 17 bp, Homo sapiens
tggggactcatgcgcat

SEQ ID NO: 1680 - DNA, 17 bp, Homo sapiens
actcatgcgcatttcca

SEQ ID NO: 1681 - DNA, 17 bp, Homo sapiens
agggccagggcatcact

SEQ ID NO: 1682 - DNA, 17 bp, Homo sapiens
tctgcaggactctgtct

SEQ ID NO: 1683 - DNA, 17 bp, Homo sapiens
cttggaggctactgtca

SEQ ID NO: 1684 - DNA, 17 bp, Homo sapiens
aggctactgtcagaaaa

SEQ ID NO: 1685 - DNA, 17 bp, Homo sapiens
acatcacaaactagcag

SEQ ID NO: 1686 - DNA, 17 bp, Homo sapiens
agcttccatccgaaaac

SEQ ID NO: 1687 - DNA, 17 bp, Homo sapiens
cttccatccgaaaactg

SEQ ID NO: 1688 - DNA, 17 bp, Homo sapiens
gaacctagaaagaggtt

SEQ ID NO: 1689 - DNA, 17 bp, Homo sapiens
gaggagggggaaaaaaa

SEQ ID NO: 1690 - DNA, 17 bp, Homo sapiens
ttattttcttgcaagta

SEQ ID NO: 1691 - DNA, 17 bp, Homo sapiens
tacagagtgtgtcaaat

SEQ ID NO: 1692 - DNA, 17 bp, Homo sapiens
cagagtgtgtcaaatga

SEQ ID NO: 1693 - DNA, 17 bp, Homo sapiens
aaatgaggacacaagaa

SEQ ID NO: 1694 - DNA, 17 bp, Homo sapiens
ttttattttttcaataa

SEQ ID NO: 1695 - DNA, 17 bp, Homo sapiens
agggacaaaatgggtgt

SEQ ID NO: 1696 - DNA, 17 bp, Homo sapiens
tgtatgaacaggttaat

SEQ ID NO: 1697 - DNA, 17 bp, Homo sapiens
atgcagacaactgccaa

SEQ ID NO: 1698 - DNA, 17 bp, Homo sapiens
gcagacaactgccaaaa

SEQ ID NO: 1699 - DNA, 17 bp, Homo sapiens
acaactgccaaaaaaac

SEQ ID NO: 1700 - DNA, 17 bp, Homo sapiens
tggtttttccaatagaa

SEQ ID NO: 1701 - DNA, 17 bp, Homo sapiens
agaacttaacaaagacc

SEQ ID NO: 1702 - DNA, 17 bp, Homo sapiens
taacaaagaccagaaac

SEQ ID NO: 1703 - DNA, 17 bp, Homo sapiens
taaataaaaaaaaaaat

SEQ ID NO: 1704 - DNA, 17 bp, Homo sapiens
aattaagtgcctctgtt

SEQ ID NO: 1705 - DNA, 17 bp, Homo sapiens
tgcctctgttttgaaca

SEQ ID NO: 1706 - DNA, 17 bp, Homo sapiens
aagataaaatttcaagt

SEQ ID NO: 1707 - DNA, 17 bp, Homo sapiens
taaaatttcaagttacg

SEQ ID NO: 1708 - DNA, 17 bp, Homo sapiens
ttacgacaaacagcttt

SEQ ID NO: 1709 - DNA, 17 bp, Homo sapiens
caggaatagaaaaggcc

SEQ ID NO: 1710 - DNA, 17 bp, Homo sapiens
aaatattctgcattgcc

SEQ ID NO: 1711 - DNA, 17 bp, Homo sapiens
ggcaatgaaaaaaactg

SEQ ID NO: 1712 - DNA, 17 bp, Homo sapiens
tagggtgatagaaggaa

SEQ ID NO: 1713 - DNA, 17 bp, Homo sapiens
agaaggaaagggacaaa

SEQ ID NO: 1714 - DNA, 17 bp, Homo sapiens
gaaagggacaaaaagca

SEQ ID NO: 1715 - DNA, 17 bp, Homo sapiens
ggacaaaaagcacacta

SEQ ID NO: 1716 - DNA, 17 bp, Homo sapiens
tattagcttgcagtact

SEQ ID NO: 1717 - DNA, 17 bp, Homo sapiens
gtatggcagcaggaaaa

SEQ ID NO: 1718 - DNA, 17 bp, Homo sapiens
aaggaacaaaaaaggat

SEQ ID NO: 1719 - DNA, 17 bp, Homo sapiens
aggatatgtacaacccc

SEQ ID NO: 1720 - DNA, 17 bp, Homo sapiens
cctatgacagccatcca

SEQ ID NO: 1721 - DNA, 17 bp, Homo sapiens
tggcttctcatctgtaa

SEQ ID NO: 1722 - DNA, 17 bp, Homo sapiens
ttttttttttttttgaa

SEQ ID NO: 1723 - DNA, 17 bp, Homo sapiens
ttttccactaccaaaaa

SEQ ID NO: 1724 - DNA, 17 bp, Homo sapiens
acattgataccttttaa

SEQ ID NO: 1725 - DNA, 17 bp, Homo sapiens
taccttttaagagaaca

SEQ ID NO: 1726 - DNA, 17 bp, Homo sapiens
gaacaagcaacagttaa

SEQ ID NO: 1727 - DNA, 17 bp, Homo sapiens
atataaatactatagtg

SEQ ID NO: 1728 - DNA, 17 bp, Homo sapiens
atagtgcctaacactag

SEQ ID NO: 1729 - DNA, 17 bp, Homo sapiens
ttcaaataccattctag

SEQ ID NO: 1730 - DNA, 17 bp, Homo sapiens
tgtattttagcatagga

SEQ ID NO: 1731 - DNA, 17 bp, Homo sapiens
caatgtatgtttttttt

SEQ ID NO: 1732 - DNA, 17 bp, Homo sapiens
actaccatttttaaatg

SEQ ID NO: 1733 - DNA, 17 bp, Homo sapiens
aaatggataacaagtct

SEQ ID NO: 1734 - DNA, 17 bp, Homo sapiens
aagtcttgtaacaccac

SEQ ID NO: 1735 - DNA, 17 bp, Homo sapiens
taaaatgcagttccccc

SEQ ID NO: 1736 - DNA, 17 bp, Homo sapiens
ttttaaaaaaaattttt

SEQ ID NO: 1737 - DNA, 17 bp, Homo sapiens
ttatatttaaaaaagtt

SEQ ID NO: 1738 - DNA, 17 bp, Homo sapiens
aagtgtattctgtttcc

SEQ ID NO: 1739 - DNA, 17 bp, Homo sapiens
cctgtaaactgggaaaa

SEQ ID NO: 1740 - DNA, 17 bp, Homo sapiens
atctctgattagagaaa

SEQ ID NO: 1741 - DNA, 17 bp, Homo sapiens
tagagaaaagatacaga

SEQ ID NO: 1742 - DNA, 17 bp, Homo sapiens
gcagagtcaagtgctat

SEQ ID NO: 1743 - DNA, 17 bp, Homo sapiens
attaaaaaaataaaaat

SEQ ID NO: 1744 - DNA, 17 bp, Homo sapiens
aatgaatcctcttccat

SEQ ID NO: 1745 - DNA, 17 bp, Homo sapiens
tgaatcctcttccatgt

SEQ ID NO: 1746 - DNA, 17 bp, Homo sapiens
ttccatgttaacacaaa

SEQ ID NO: 1747 - DNA, 17 bp, Homo sapiens
ccatgttaacacaaata

SEQ ID NO: 1748 - DNA, 17 bp, Homo sapiens
tgtatggaaaagaaatg

SEQ ID NO: 1749 - DNA, 17 bp, Homo sapiens
gaagtacaacttttagg

SEQ ID NO: 1750 - DNA, 17 bp, Homo sapiens
tacaacttttagggagc

SEQ ID NO: 1751 - DNA, 17 bp, Homo sapiens
tcttctttttttaagaa

SEQ ID NO: 1752 - DNA, 17 bp, Homo sapiens
ctcttcctttcaatatg

SEQ ID NO: 1753 - DNA, 17 bp, Homo sapiens
tatcatttgattgtcca

SEQ ID NO: 1754 - DNA, 17 bp, Homo sapiens
ggtgccagtatttttaa

SEQ ID NO: 1755 - DNA, 17 bp, Homo sapiens
attgcgttccagggctt

SEQ ID NO: 1756 - DNA, 17 bp, Homo sapiens
gttccagggcttttgca

SEQ ID NO: 1757 - DNA, 17 bp, Homo sapiens
tccagggcttttgcaca

SEQ ID NO: 1758 - DNA, 17 bp, Homo sapiens
aaaaataaaactttggg

SEQ ID NO: 1759 - DNA, 17 bp, Homo sapiens
gaaaaatgatgattaac

SEQ ID NO: 1760 - DNA, 17 bp, Homo sapiens
gtagccattgttgtgag

SEQ ID NO: 1761 - DNA, 17 bp, Homo sapiens
cacccaatgctgaatta

SEQ ID NO: 1762 - DNA, 17 bp, Homo sapiens
gaattaagctacaagtt

SEQ ID NO: 1763 - DNA, 17 bp, Homo sapiens
ttttcttcctttccaat

SEQ ID NO: 1764 - DNA, 17 bp, Homo sapiens
gatacatttaacccttt

SEQ ID NO: 1765 - DNA, 17 bp, Homo sapiens
catttaaccctttagag

SEQ ID NO: 1766 - DNA, 17 bp, Homo sapiens
cacgttataaaataaaa

SEQ ID NO: 1767 - DNA, 17 bp, Homo sapiens
aaactgtacatgatatg

SEQ ID NO: 1768 - DNA, 17 bp, Homo sapiens
tctctcagaacggaact

SEQ ID NO: 1769 - DNA, 17 bp, Homo sapiens
agaacggaactggaaac

SEQ ID NO: 1770 - DNA, 17 bp, Homo sapiens
ttgctcagcaacgaatt

SEQ ID NO: 1771 - DNA, 17 bp, Homo sapiens
ggacaatttaaaatagc

SEQ ID NO: 1772 - DNA, 17 bp, Homo sapiens
aaaatagccataacata

SEQ ID NO: 1773 - DNA, 17 bp, Homo sapiens
gctgtctaagtttaaaa

SEQ ID NO: 1774 - DNA, 17 bp, Homo sapiens
tctaagtttaaaaaaaa

SEQ ID NO: 1775 - DNA, 17 bp, Homo sapiens
taagtttaaaaaaaaac

SEQ ID NO: 1776 - DNA, 17 bp, Homo sapiens
gtttaaaaaaaaacata

SEQ ID NO: 1777 - DNA, 17 bp, Homo sapiens
acacaacatgtaaatta

SEQ ID NO: 1778 - DNA, 17 bp, Homo sapiens
aatgcaatagtattgcc

SEQ ID NO: 1779 - DNA, 17 bp, Homo sapiens
tcatgcattcaaacggt

SEQ ID NO: 1780 - DNA, 17 bp, Homo sapiens
agaaaaagaaaaagaaa

SEQ ID NO: 1781 - DNA, 17 bp, Homo sapiens
aaaaaaacaggtgtgct

SEQ ID NO: 1782 - DNA, 17 bp, Homo sapiens
gtttgtttgtttgttta

SEQ ID NO: 1783 - DNA, 17 bp, Homo sapiens
atgggactagaaaaaaa

SEQ ID NO: 1784 - DNA, 17 bp, Homo sapiens
cagtttttatatcatta

SEQ ID NO: 1785 - DNA, 17 bp, Homo sapiens
tgtgtttctccagggta

SEQ ID NO: 1786 - DNA, 17 bp, Homo sapiens
gtacacgctaaaaggca

SEQ ID NO: 1787 - DNA, 17 bp, Homo sapiens
aaaaggcatcttacaaa

SEQ ID NO: 1788 - DNA, 17 bp, Homo sapiens
ggtgagcttgctactct

SEQ ID NO: 1789 - DNA, 17 bp, Homo sapiens
tctgggcacaggcatag

SEQ ID NO: 1790 - DNA, 17 bp, Homo sapiens
cccgtgtggcttctcct

SEQ ID NO: 1791 - DNA, 17 bp, Homo sapiens
cctgtggacagtgagat

SEQ ID NO: 1792 - DNA, 17 bp, Homo sapiens
acagttcttgaagactt

SEQ ID NO: 1793 - DNA, 17 bp, Homo sapiens
gaagactttcccacagt

SEQ ID NO: 1794 - DNA, 17 bp, Homo sapiens
agccggcgagccactgc

SEQ ID NO: 1795 - DNA, 17 bp, Homo sapiens
tgcccagcagcagcttt

SEQ ID NO: 1796 - DNA, 17 bp, Homo sapiens
ggggagcagccgcggcc

SEQ ID NO: 1797 - DNA, 17 bp, Homo sapiens
cctgggtgcacgcgtgg

SEQ ID NO: 1798 - DNA, 17 bp, Homo sapiens
tagggctgggccggcct

SEQ ID NO: 1799 - DNA, 17 bp, Homo sapiens
gatgtctcggtggtgga

SEQ ID NO: 1800 - DNA, 17 bp, Homo sapiens
atggagaggtggctggg

SEQ ID NO: 1801 - DNA, 17 bp, Homo sapiens
gaatggctgtttgcaag

SEQ ID NO: 1802 - DNA, 17 bp, Homo sapiens
catctttacctgcaaaa

SEQ ID NO: 1803 - DNA, 17 bp, Homo sapiens
ctttacctgcaaaataa

SEQ ID NO: 1804 - DNA, 17 bp, Homo sapiens
ctgcaaaataatacaac

SEQ ID NO: 1805 - DNA, 17 bp, Homo sapiens
tccagaaattctcatct

SEQ ID NO: 1806 - DNA, 17 bp, Homo sapiens
cagaaattctcatctct

SEQ ID NO: 1807 - DNA, 17 bp, Homo sapiens
ttctcatctctatacac

SEQ ID NO: 1808 - DNA, 17 bp, Homo sapiens
agaagaaataaggctca

SEQ ID NO: 1809 - DNA, 17 bp, Homo sapiens
agaaacccaaaatcaag

SEQ ID NO: 1810 - DNA, 17 bp, Homo sapiens
ccaaaatcaagcactac

SEQ ID NO: 1811 - DNA, 17 bp, Homo sapiens
aatcaagcactacagct

SEQ ID NO: 1812 - DNA, 17 bp, Homo sapiens
aaacaacgtgcatcata

SEQ ID NO: 1813 - DNA, 17 bp, Homo sapiens
catcataaaccacagga

SEQ ID NO: 1814 - DNA, 17 bp, Homo sapiens
tcaattccattaaaata

SEQ ID NO: 1815 - DNA, 17 bp, Homo sapiens
attccattaaaatagat

SEQ ID NO: 1816 - DNA, 17 bp, Homo sapiens
attaaaatagattacaa

SEQ ID NO: 1817 - DNA, 17 bp, Homo sapiens
gttttccagggtggggt

SEQ ID NO: 1818 - DNA, 17 bp, Homo sapiens
tctctgcctgttgtgat

SEQ ID NO: 1819 - DNA, 17 bp, Homo sapiens
atgcttacatataacgt

SEQ ID NO: 1820 - DNA, 17 bp, Homo sapiens
ttacatataacgtcata

SEQ ID NO: 1821 - DNA, 17 bp, Homo sapiens
acatataacgtcataac

SEQ ID NO: 1822 - DNA, 17 bp, Homo sapiens
ctcaatgggccctcaat

SEQ ID NO: 1823 - DNA, 17 bp, Homo sapiens
atgggccctcaatcagc

SEQ ID NO: 1824 - DNA, 17 bp, Homo sapiens
gggccctcaatcagcac

SEQ ID NO: 1825 - DNA, 17 bp, Homo sapiens
gccctcaatcagcacat

SEQ ID NO: 1826 - DNA, 17 bp, Homo sapiens
taattcttttcctgctc

SEQ ID NO: 1827 - DNA, 17 bp, Homo sapiens
aagagggaagagaggag

SEQ ID NO: 1828 - DNA, 17 bp, Homo sapiens
ggttcaaggcaaggatt

SEQ ID NO: 1829 - DNA, 17 bp, Homo sapiens
ttctggaagagcctggt

SEQ ID NO: 1830 - DNA, 17 bp, Homo sapiens
agtacatctctcctgcc

SEQ ID NO: 1831 - DNA, 17 bp, Homo sapiens
tcaacgtcccactttct

SEQ ID NO: 1832 - DNA, 17 bp, Homo sapiens
aggtgtcagtgaggccc

SEQ ID NO: 1833 - DNA, 17 bp, Homo sapiens
ctccccggaccaaaggg

SEQ ID NO: 1834 - DNA, 17 bp, Homo sapiens
gagtggagaggctgctg

SEQ ID NO: 1835 - DNA, 17 bp, Homo sapiens
gctctgggcagcacctg

SEQ ID NO: 1836 - DNA, 17 bp, Homo sapiens
ggccacagcatgtggaa

SEQ ID NO: 1837 - DNA, 17 bp, Homo sapiens
aaagcatttggcaggca

SEQ ID NO: 1838 - DNA, 17 bp, Homo sapiens
gaagcgttgctaggaga

SEQ ID NO: 1839 - DNA, 17 bp, Homo sapiens
ggagaatggacacggca

SEQ ID NO: 1840 - DNA, 17 bp, Homo sapiens
ggaagaagctggcgctc

SEQ ID NO: 1841 - DNA, 17 bp, Homo sapiens
tccctgagggtctcctt

SEQ ID NO: 1842 - DNA, 17 bp, Homo sapiens
gattccagaagagtttg

SEQ ID NO: 1843 - DNA, 17 bp, Homo sapiens
aaagccagcaccataga

SEQ ID NO: 1844 - DNA, 17 bp, Homo sapiens
atcccacctcaaactca

SEQ ID NO: 1845 - DNA, 17 bp, Homo sapiens
aagacaacctggatgtg

SEQ ID NO: 1846 - DNA, 17 bp, Homo sapiens
acttctttgtgatggat

SEQ ID NO: 1847 - DNA, 17 bp, Homo sapiens
caatttgaaaggatgga

SEQ ID NO: 1848 - DNA, 17 bp, Homo sapiens
aaggatggagaatacag

SEQ ID NO: 1849 - DNA, 17 bp, Homo sapiens
ggagaatacaggaaaac

SEQ ID NO: 1850 - DNA, 17 bp, Homo sapiens
agtaacatttggttttg

SEQ ID NO: 1851 - DNA, 17 bp, Homo sapiens
ttgatttcaggctcatt

SEQ ID NO: 1852 - DNA, 17 bp, Homo sapiens
acttgcaaagcaggatt

SEQ ID NO: 1853 - DNA, 17 bp, Homo sapiens
cttacattgcaactttt

SEQ ID NO: 1854 - DNA, 17 bp, Homo sapiens
tatgcccagaactggag

SEQ ID NO: 1855 - DNA, 17 bp, Homo sapiens
agaagattgaaaaactt

SEQ ID NO: 1856 - DNA, 17 bp, Homo sapiens
accacagaacccatggg

SEQ ID NO: 1857 - DNA, 17 bp, Homo sapiens
gtgcaagtcagactgag

SEQ ID NO: 1858 - DNA, 17 bp, Homo sapiens
cagtcgtttttattcag

SEQ ID NO: 1859 - DNA, 17 bp, Homo sapiens
ctataatttatagtctc

SEQ ID NO: 1860 - DNA, 17 bp, Homo sapiens
tttatagtctcatttac

SEQ ID NO: 1861 - DNA, 17 bp, Homo sapiens
tttacaattacaccata

SEQ ID NO: 1862 - DNA, 17 bp, Homo sapiens
tacaattacaccataag

SEQ ID NO: 1863 - DNA, 17 bp, Homo sapiens
tacaccataaggtacac

SEQ ID NO: 1864 - DNA, 17 bp, Homo sapiens
taggagagaatcagaat

SEQ ID NO: 1865 - DNA, 17 bp, Homo sapiens
tgtggttttaattcttg

SEQ ID NO: 1866 - DNA, 17 bp, Homo sapiens
gttttaattcttgcttg

SEQ ID NO: 1867 - DNA, 17 bp, Homo sapiens
tcgatatgtaaatacga

SEQ ID NO: 1868 - DNA, 17 bp, Homo sapiens
ggctttggatctccgaa

SEQ ID NO: 1869 - DNA, 17 bp, Homo sapiens
ttgcttcattaatcatg

SEQ ID NO: 1870 - DNA, 17 bp, Homo sapiens
ctgttcattttccttcc

SEQ ID NO: 1871 - DNA, 17 bp, Homo sapiens
cattttccttccagtca

SEQ ID NO: 1872 - DNA, 17 bp, Homo sapiens
tttccttccagtcacaa

SEQ ID NO: 1873 - DNA, 17 bp, Homo sapiens
tccttccagtcacaaga

SEQ ID NO: 1874 - DNA, 17 bp, Homo sapiens
cacatggaaatggtcat

SEQ ID NO: 1875 - DNA, 17 bp, Homo sapiens
ggggagataaaatcttc

SEQ ID NO: 1876 - DNA, 17 bp, Homo sapiens
taaaatcttcacctaca

SEQ ID NO: 1877 - DNA, 17 bp, Homo sapiens
aatgtggtggattcaag

SEQ ID NO: 1878 - DNA, 17 bp, Homo sapiens
tggattcaagaaataca

SEQ ID NO: 1879 - DNA, 17 bp, Homo sapiens
acaactccttactgctt

SEQ ID NO: 1880 - DNA, 17 bp, Homo sapiens
acctctgaaaatgaaaa

SEQ ID NO: 1881 - DNA, 17 bp, Homo sapiens
aaatgaaaagaaaacat

SEQ ID NO: 1882 - DNA, 17 bp, Homo sapiens
tcctctagatgacgttg

SEQ ID NO: 1883 - DNA, 17 bp, Homo sapiens
gaaggggaaggtggctt

SEQ ID NO: 1884 - DNA, 17 bp, Homo sapiens
gaagttcatctggcact

SEQ ID NO: 1885 - DNA, 17 bp, Homo sapiens
ggctcggctgtggttgg

SEQ ID NO: 1886 - DNA, 17 bp, Homo sapiens
tgtggttggagaaacaa

SEQ ID NO: 1887 - DNA, 17 bp, Homo sapiens
attattagagtgccaga

SEQ ID NO: 1888 - DNA, 17 bp, Homo sapiens
gaggacagaaaggggag

SEQ ID NO: 1889 - DNA, 17 bp, Homo sapiens
tcaaccccatgccatcc

SEQ ID NO: 1890 - DNA, 17 bp, Homo sapiens
tgactttcccgagtcct

SEQ ID NO: 1891 - DNA, 17 bp, Homo sapiens
acctggccgggctgtaa

SEQ ID NO: 1892 - DNA, 17 bp, Homo sapiens
gtttgccttgcttgcgg

SEQ ID NO: 1893 - DNA, 17 bp, Homo sapiens
gggcggacgacggctcg

SEQ ID NO: 1894 - DNA, 17 bp, Homo sapiens
tatcttcatcagtgcct

SEQ ID NO: 1895 - DNA, 17 bp, Homo sapiens
ccaaaataaattagaaa

SEQ ID NO: 1896 - DNA, 17 bp, Homo sapiens
gaacgtcaggagtctgg

SEQ ID NO: 1897 - DNA, 17 bp, Homo sapiens
caggagtctggatggac

SEQ ID NO: 1898 - DNA, 17 bp, Homo sapiens
ggagtctggatggacag

SEQ ID NO: 1899 - DNA, 17 bp, Homo sapiens
agtctggatggacagag

SEQ ID NO: 1900 - DNA, 17 bp, Homo sapiens
ggatggacagagacaca

SEQ ID NO: 1901 - DNA, 17 bp, Homo sapiens
cgtccgcacttgaactt

SEQ ID NO: 1902 - DNA, 17 bp, Homo sapiens
tattttggatgtcaaaa

SEQ ID NO: 1903 - DNA, 17 bp, Homo sapiens
cgccgccgccgccgccc

SEQ ID NO: 1904 - DNA, 17 bp, Homo sapiens
ccgccgccgcccgcccc

SEQ ID NO: 1905 - DNA, 17 bp, Homo sapiens
cgggaattctcgcgtaa

SEQ ID NO: 1906 - DNA, 17 bp, Homo sapiens
gagagcgcgcaggacta

SEQ ID NO: 1907 - DNA, 17 bp, Homo sapiens
cctcgccgctctccccc

SEQ ID NO: 1908 - DNA, 17 bp, Homo sapiens
ccccaactcccccggcc

SEQ ID NO: 1909 - DNA, 17 bp, Homo sapiens
ctcccccggccgcgccg

SEQ ID NO: 1910 - DNA, 17 bp, Homo sapiens
ccggccgcgccggatgc

SEQ ID NO: 1911 - DNA, 17 bp, Homo sapiens
ttcggaaggatgcagtg

SEQ ID NO: 1912 - DNA, 17 bp, Homo sapiens
cggaaggatgcagtggg

SEQ ID NO: 1913 - DNA, 17 bp, Homo sapiens
ccattcttacagatgat

SEQ ID NO: 1914 - DNA, 17 bp, Homo sapiens
accacggcccgttggga

SEQ ID NO: 1915 - DNA, 17 bp, Homo sapiens
ctcctcacctgtgggca

SEQ ID NO: 1916 - DNA, 17 bp, Homo sapiens
caatcgagatgaaaaaa

SEQ ID NO: 1917 - DNA, 17 bp, Homo sapiens
gtcatctagaggaattt

SEQ ID NO: 1918 - DNA, 17 bp, Homo sapiens
ggaatttgccccaaaca

SEQ ID NO: 1919 - DNA, 17 bp, Homo sapiens
tcattttcagaggtgct

SEQ ID NO: 1920 - DNA, 17 bp, Homo sapiens
gatttgtcgtcttcgga

SEQ ID NO: 1921 - DNA, 17 bp, Homo sapiens
accacacttcttactga

SEQ ID NO: 1922 - DNA, 17 bp, Homo sapiens
ctggaggatgtatttgt

SEQ ID NO: 1923 - DNA, 17 bp, Homo sapiens
tttctctttatttatgt

SEQ ID NO: 1924 - DNA, 17 bp, Homo sapiens
ggagagagggggagaag

SEQ ID NO: 1925 - DNA, 17 bp, Homo sapiens
ccccatctgtccagaat

SEQ ID NO: 1926 - DNA, 17 bp, Homo sapiens
gcctgaaatcaagtgag

SEQ ID NO: 1927 - DNA, 17 bp, Homo sapiens
tcaagtgagggtcctga

SEQ ID NO: 1928 - DNA, 17 bp, Homo sapiens
agcaagacctgaggttc

SEQ ID NO: 1929 - DNA, 17 bp, Homo sapiens
ggcctcagcactggcga

SEQ ID NO: 1930 - DNA, 17 bp, Homo sapiens
gagtttgaggtgggatg

SEQ ID NO: 1931 - DNA, 17 bp, Homo sapiens
tagaacaaactcttctg

SEQ ID NO: 1932 - DNA, 17 bp, Homo sapiens
ctcttctggaatcatag

SEQ ID NO: 1933 - DNA, 17 bp, Homo sapiens
cataggtaacccaaggg

SEQ ID NO: 1934 - DNA, 17 bp, Homo sapiens
tgcaaaggtccagccct

SEQ ID NO: 1935 - DNA, 17 bp, Homo sapiens
agccctgtcgccaagga

SEQ ID NO: 1936 - DNA, 17 bp, Homo sapiens
ctattcccacggcccct

SEQ ID NO: 1937 - DNA, 17 bp, Homo sapiens
ttggccagtttgccata

SEQ ID NO: 1938 - DNA, 17 bp, Homo sapiens
aggaaaagtccagtgca

SEQ ID NO: 1939 - DNA, 17 bp, Homo sapiens
tacagtagagcagacag

SEQ ID NO: 1940 - DNA, 17 bp, Homo sapiens
gtgagtgcctggctgga

SEQ ID NO: 1941 - DNA, 17 bp, Homo sapiens
cggtggctgctctctcc

SEQ ID NO: 1942 - DNA, 17 bp, Homo sapiens
gtctagcagcttccgga

SEQ ID NO: 1943 - DNA, 17 bp, Homo sapiens
catggggcttgaggtct

SEQ ID NO: 1944 - DNA, 17 bp, Homo sapiens
agatggcagagtaccag

SEQ ID NO: 1945 - DNA, 17 bp, Homo sapiens
gtctccttccacatgct

SEQ ID NO: 1946 - DNA, 17 bp, Homo sapiens
catgctgtggcccaggt

SEQ ID NO: 1947 - DNA, 17 bp, Homo sapiens
aggtgctgcccagagct

SEQ ID NO: 1948 - DNA, 17 bp, Homo sapiens
gggagcttcatgttcct

SEQ ID NO: 1949 - DNA, 17 bp, Homo sapiens
tttgctagccctggccc

SEQ ID NO: 1950 - DNA, 17 bp, Homo sapiens
ttccagaaggggtaact

SEQ ID NO: 1951 - DNA, 17 bp, Homo sapiens
atccttgccttgaacct

SEQ ID NO: 1952 - DNA, 17 bp, Homo sapiens
ttttgacttttagggaa

SEQ ID NO: 1953 - DNA, 17 bp, Homo sapiens
aaactctcaaaccacag

SEQ ID NO: 1954 - DNA, 17 bp, Homo sapiens
tatgacgttatatgtaa

SEQ ID NO: 1955 - DNA, 17 bp, Homo sapiens
acaggcagagaatgtct

SEQ ID NO: 1956 - DNA, 17 bp, Homo sapiens
ggatgagtgcagaatat

SEQ ID NO: 1957 - DNA, 17 bp, Homo sapiens
cagggtatttgtaagtt

SEQ ID NO: 1958 - DNA, 17 bp, Homo sapiens
cagggaaggctggaggt

SEQ ID NO: 1959 - DNA, 17 bp, Homo sapiens
taaagatgagcccagca

SEQ ID NO: 1960 - DNA, 17 bp, Homo sapiens
gtatcccttcaggacta

SEQ ID NO: 1961 - DNA, 17 bp, Homo sapiens
cagccacctctccatgg

SEQ ID NO: 1962 - DNA, 17 bp, Homo sapiens
caccgagacatcacttg

SEQ ID NO: 1963 - DNA, 17 bp, Homo sapiens
accgcatagagcgcctg

SEQ ID NO: 1964 - DNA, 17 bp, Homo sapiens
cggaagagatggccctg

SEQ ID NO: 1965 - DNA, 17 bp, Homo sapiens
gacagggtgctgcggtt

SEQ ID NO: 1966 - DNA, 17 bp, Homo sapiens
gccatggatttctctag

SEQ ID NO: 1967 - DNA, 17 bp, Homo sapiens
caggccagcaagctgaa

SEQ ID NO: 1968 - DNA, 17 bp, Homo sapiens
ctgaagcgccacatgaa

SEQ ID NO: 1969 - DNA, 17 bp, Homo sapiens
acgcacatgcacaaatc

SEQ ID NO: 1970 - DNA, 17 bp, Homo sapiens
gcgcgctcaagtccgtg

SEQ ID NO: 1971 - DNA, 17 bp, Homo sapiens
agttcaagagcgagaac

SEQ ID NO: 1972 - DNA, 17 bp, Homo sapiens
gaggaagaggaggagga

SEQ ID NO: 1973 - DNA, 17 bp, Homo sapiens
gacgtcatgcagggcat

SEQ ID NO: 1974 - DNA, 17 bp, Homo sapiens
caccaggtcctgggcga

SEQ ID NO: 1975 - DNA, 17 bp, Homo sapiens
agcgcggccacctggcc

SEQ ID NO: 1976 - DNA, 17 bp, Homo sapiens
cacctggccgaggccga

SEQ ID NO: 1977 - DNA, 17 bp, Homo sapiens
gggccacagggacactt

SEQ ID NO: 1978 - DNA, 17 bp, Homo sapiens
aagactcggtggccggc

SEQ ID NO: 1979 - DNA, 17 bp, Homo sapiens
tcggtggccggcgagtc

SEQ ID NO: 1980 - DNA, 17 bp, Homo sapiens
gacctgcccccggccgc

SEQ ID NO: 1981 - DNA, 17 bp, Homo sapiens
ggctacgcggcctccag

SEQ ID NO: 1982 - DNA, 17 bp, Homo sapiens
caaagatcccttcctta

SEQ ID NO: 1983 - DNA, 17 bp, Homo sapiens
ctggacggagggatctc

SEQ ID NO: 1984 - DNA, 17 bp, Homo sapiens
ggaagtggagggagcac

SEQ ID NO: 1985 - DNA, 17 bp, Homo sapiens
gtgtacagtaccctgga

SEQ ID NO: 1986 - DNA, 17 bp, Homo sapiens
caaacaaacaaacagaa

SEQ ID NO: 1987 - DNA, 17 bp, Homo sapiens
aaacaaacagaagtaac

SEQ ID NO: 1988 - DNA, 17 bp, Homo sapiens
tatggctattttaaatt

SEQ ID NO: 1989 - DNA, 17 bp, Homo sapiens
taaattgtccctaattc

SEQ ID NO: 1990 - DNA, 17 bp, Homo sapiens
agagagaaaaagaccat

SEQ ID NO: 1991 - DNA, 17 bp, Homo sapiens
ctatgagctaaatgtct

SEQ ID NO: 1992 - DNA, 17 bp, Homo sapiens
ctacttgttataaactt

SEQ ID NO: 1993 - DNA, 17 bp, Homo sapiens
tatttctcacaacaatg

SEQ ID NO: 1994 - DNA, 17 bp, Homo sapiens
taatgtgcaaaagccct

SEQ ID NO: 1995 - DNA, 17 bp, Homo sapiens
gtctttttaaaaatact

SEQ ID NO: 1996 - DNA, 17 bp, Homo sapiens
tctttttaaaaatactg

SEQ ID NO: 1997 - DNA, 17 bp, Homo sapiens
tggcaccaaaagaaata

SEQ ID NO: 1998 - DNA, 17 bp, Homo sapiens
taccatattgaaaggaa

SEQ ID NO: 1999 - DNA, 17 bp, Homo sapiens
ataaggtttgacagagg

SEQ ID NO: 2000 - DNA, 17 bp, Homo sapiens
gcagtatatatgtctgt

SEQ ID NO: 2001 - DNA, 17 bp, Homo sapiens
tcttttctctaatcaga

SEQ ID NO: 2002 - DNA, 17 bp, Homo sapiens
tgcaagcgctgtgaatg

SEQ ID NO: 2003 - DNA, 17 bp, Homo sapiens
ggaaattctatgccttg

SEQ ID NO: 2004 - DNA, 17 bp, Homo sapiens
aaatgcacactcatgtt

SEQ ID NO: 2005 - DNA, 17 bp, Homo sapiens
gtgcaaattatttgtat

SEQ ID NO: 2006 - DNA, 17 bp, Homo sapiens
aaaaaaaaaaaaagaga

SEQ ID NO: 2007 - DNA, 17 bp, Homo sapiens
tatcaccctacattcca

SEQ ID NO: 2008 - DNA, 17 bp, Homo sapiens
gccctgttcaaaacaga

SEQ ID NO: 2009 - DNA, 17 bp, Homo sapiens
cagtcagtctttttcag

SEQ ID NO: 2010 - DNA, 17 bp, Homo sapiens
ttttttccccctcctct

SEQ ID NO: 2011 - DNA, 17 bp, Homo sapiens
gggtggggtggacgcgt

SEQ ID NO: 2012 - DNA, 17 bp, Homo sapiens
gatgttttctgacagta

SEQ ID NO: 2013 - DNA, 17 bp, Homo sapiens
gtaaaaacaaaaaaaca

SEQ ID NO: 2014 - DNA, 17 bp, Homo sapiens
attggaacagtgaatca

SEQ ID NO: 2015 - DNA, 17 bp, Homo sapiens
tgtggaaatgcgcatga

SEQ ID NO: 2016 - DNA, 17 bp, Homo sapiens
gcttataagacaatgag

SEQ ID NO: 2017 - DNA, 17 bp, Homo sapiens
tttgtacttctgtacct

SEQ ID NO: 2018 - DNA, 17 bp, Homo sapiens
tgtacctgtttcctaca

SEQ ID NO: 2019 - DNA, 17 bp, Homo sapiens
ccatcgggtgggtagga

SEQ ID NO: 2020 - DNA, 17 bp, Homo sapiens
gcataaattttcaagga

SEQ ID NO: 2021 - DNA, 17 bp, Homo sapiens
ggtgataaatgtcagta

SEQ ID NO: 2022 - DNA, 17 bp, Homo sapiens
taaatattctaatttta

SEQ ID NO: 2023 - DNA, 17 bp, Homo sapiens
aaatattctaattttag

SEQ ID NO: 2024 - DNA, 17 bp, Homo sapiens
cttacatcaggaaattt

SEQ ID NO: 2025 - DNA, 17 bp, Homo sapiens
ctattccttagaaatta

SEQ ID NO: 2026 - DNA, 17 bp, Homo sapiens
attccttagaaattagt

SEQ ID NO: 2027 - DNA, 17 bp, Homo sapiens
attttttactgcttgga

SEQ ID NO: 2028 - DNA, 17 bp, Homo sapiens
gacacctgtgtgctgta

SEQ ID NO: 2029 - DNA, 17 bp, Homo sapiens
attcacatacaggccgt

SEQ ID NO: 2030 - DNA, 17 bp, Homo sapiens
tatttcacctgctctct

SEQ ID NO: 2031 - DNA, 17 bp, Homo sapiens
tagaagtcgtgagatct

SEQ ID NO: 2032 - DNA, 17 bp, Homo sapiens
gaatctacagcacacag

SEQ ID NO: 2033 - DNA, 17 bp, Homo sapiens
ttttaatttgctatgtt

SEQ ID NO: 2034 - DNA, 17 bp, Homo sapiens
ttctgtgcaaattaact

SEQ ID NO: 2035 - DNA, 17 bp, Homo sapiens
accacctgtttgtagat

SEQ ID NO: 2036 - DNA, 17 bp, Homo sapiens
agatgtaacttatttgt

SEQ ID NO: 2037 - DNA, 17 bp, Homo sapiens
tcccccctctaaaatct

SEQ ID NO: 2038 - DNA, 17 bp, Homo sapiens
tatttcctgaaggtttg

SEQ ID NO: 2039 - DNA, 17 bp, Homo sapiens
atttcctgaaggtttgg

SEQ ID NO: 2040 - DNA, 17 bp, Homo sapiens
tcaaatcctgcatggta

SEQ ID NO: 2041 - DNA, 17 bp, Homo sapiens
gaaaaacaggattcggc

SEQ ID NO: 2042 - DNA, 17 bp, Homo sapiens
atgccatctgataagcg

SEQ ID NO: 2043 - DNA, 17 bp, Homo sapiens
ggtgtctgtaggaaaca

SEQ ID NO: 2044 - DNA, 17 bp, Homo sapiens
atagaaacaaggggttg

SEQ ID NO: 2045 - DNA, 17 bp, Homo sapiens
ggtaattaggttggctg

SEQ ID NO: 2046 - DNA, 17 bp, Homo sapiens
ccacgggccctctctat

SEQ ID NO: 2047 - DNA, 17 bp, Homo sapiens
ccaccccacccctgggg

SEQ ID NO: 2048 - DNA, 17 bp, Homo sapiens
gcttccatccgaaaact

SEQ ID NO: 2049 - DNA, 17 bp, Homo sapiens
aacctagaaagaggttg

SEQ ID NO: 2050 - DNA, 17 bp, Homo sapiens
caagtaatttacagagt

SEQ ID NO: 2051 - DNA, 17 bp, Homo sapiens
gtcaaatgaggacacaa

SEQ ID NO: 2052 - DNA, 17 bp, Homo sapiens
tttattttttcaataaa

SEQ ID NO: 2053 - DNA, 17 bp, Homo sapiens
gaacttaacaaagacca

SEQ ID NO: 2054 - DNA, 17 bp, Homo sapiens
gcctctgttttgaacag

SEQ ID NO: 2055 - DNA, 17 bp, Homo sapiens
aagcaataataaatagt

SEQ ID NO: 2056 - DNA, 17 bp, Homo sapiens
agggtgatagaaggaaa

SEQ ID NO: 2057 - DNA, 17 bp, Homo sapiens
tatggcagcaggaaaaa

SEQ ID NO: 2058 - DNA, 17 bp, Homo sapiens
caaaccgccattatatg

SEQ ID NO: 2059 - DNA, 17 bp, Homo sapiens
ctctttttttttttttt

SEQ ID NO: 2060 - DNA, 17 bp, Homo sapiens
tcaatataaatactata

SEQ ID NO: 2061 - DNA, 17 bp, Homo sapiens
aacctgaagagcggtgt

SEQ ID NO: 2062 - DNA, 17 bp, Homo sapiens
acaccaccaagacaatg

SEQ ID NO: 2063 - DNA, 17 bp, Homo sapiens
aaaatccttgcactgta

SEQ ID NO: 2064 - DNA, 17 bp, Homo sapiens
acagcgcttgcaatgtt

SEQ ID NO: 2065 - DNA, 17 bp, Homo sapiens
tttagtttttaaaaaat

SEQ ID NO: 2066 - DNA, 17 bp, Homo sapiens
tctctgattagagaaaa

SEQ ID NO: 2067 - DNA, 17 bp, Homo sapiens
ctatttgaacaccaact

SEQ ID NO: 2068 - DNA, 17 bp, Homo sapiens
tgaagtacaacttttag

SEQ ID NO: 2069 - DNA, 17 bp, Homo sapiens
cttttaagctctcacca

SEQ ID NO: 2070 - DNA, 17 bp, Homo sapiens
tatagaattatatgcta

SEQ ID NO: 2071 - DNA, 17 bp, Homo sapiens
ggttttaatagatccaa

SEQ ID NO: 2072 - DNA, 17 bp, Homo sapiens
atacatttaacccttta

SEQ ID NO: 2073 - DNA, 17 bp, Homo sapiens
agcaacatgtttgctca

SEQ ID NO: 2074 - DNA, 17 bp, Homo sapiens
ttattgcacaagagaaa

SEQ ID NO: 2075 - DNA, 17 bp, Homo sapiens
taaaatgcaatagtatt

SEQ ID NO: 2076 - DNA, 17 bp, Homo sapiens
actgtacacgctaaaag

SEQ ID NO: 2077 - DNA, 17 bp, Homo sapiens
ctctgggcacaggcata

SEQ ID NO: 2078 - DNA, 17 bp, Homo sapiens
tgagctgggcctgcccg

SEQ ID NO: 2079 - DNA, 17 bp, Homo sapiens
tccccgggcggtgtgga

SEQ ID NO: 2080 - DNA, 17 bp, Homo sapiens
aggagtgctccgacgag

SEQ ID NO: 2081 - DNA, 17 bp, Homo sapiens
aaaggcgattgtctgga

SEQ ID NO: 2082 - DNA, 17 bp, Homo sapiens
gattgtctggagtctcc

SEQ ID NO: 2083 - DNA, 17 bp, Homo sapiens
ctttgagctgcctggag

SEQ ID NO: 2084 - DNA, 17 bp, Homo sapiens
ttgatgcgcttagagaa

SEQ ID NO: 2085 - DNA, 17 bp, Homo sapiens
gggctcagcgagctggg

SEQ ID NO: 2086 - DNA, 17 bp, Homo sapiens
ttttggacaggcccccc

SEQ ID NO: 2087 - DNA, 17 bp, Homo sapiens
tgcggtccgactcgccg

SEQ ID NO: 2088 - DNA, 17 bp, Homo sapiens
tcgctgaagtgctgcat

SEQ ID NO: 2089 - DNA, 17 bp, Homo sapiens
ggcagggcgcggctctc

SEQ ID NO: 2090 - DNA, 17 bp, Homo sapiens
ttgagcgcgctgctggc

SEQ ID NO: 2091 - DNA, 17 bp, Homo sapiens
gcctgggtgcacgcgtg

SEQ ID NO: 2092 - DNA, 17 bp, Homo sapiens
tgaaatttgaacgtctt

SEQ ID NO: 2093 - DNA, 17 bp, Homo sapiens
ggggctgggagggagga

SEQ ID NO: 2094 - DNA, 17 bp, Homo sapiens
ccctgccagctctctaa

SEQ ID NO: 2095 - DNA, 17 bp, Homo sapiens
gaaatccatggcgggag

SEQ ID NO: 2096 - DNA, 17 bp, Homo sapiens
ggcgctctatgcggtgg

SEQ ID NO: 2097 - DNA, 17 bp, Homo sapiens
ggccggaagcctctctc

SEQ ID NO: 2098 - DNA, 17 bp, Homo sapiens
gttattgtctgcaatat

SEQ ID NO: 2099 - DNA, 17 bp, Homo sapiens
gcacctagtcctgaagg

SEQ ID NO: 2100 - DNA, 17 bp, Homo sapiens
tgttcgctttctaagta

SEQ ID NO: 2101 - DNA, 17 bp, Homo sapiens
acttacaaataccctgc

SEQ ID NO: 2102 - DNA, 17 bp, Homo sapiens
gaagtttatctgtgaaa

SEQ ID NO: 2103 - DNA, 17 bp, Homo sapiens
caaaatcaagcactaca

SEQ ID NO: 2104 - DNA, 17 bp, Homo sapiens
acagctacaaacaacgt

SEQ ID NO: 2105 - DNA, 17 bp, Homo sapiens
gctgttttccagggtgg

SEQ ID NO: 2106 - DNA, 17 bp, Homo sapiens
cattctctgcctgttgt

SEQ ID NO: 2107 - DNA, 17 bp, Homo sapiens
tcaaaatattctcaatg

SEQ ID NO: 2108 - DNA, 17 bp, Homo sapiens
tgccaccatgggagcct

SEQ ID NO: 2109 - DNA, 17 bp, Homo sapiens
cccatgcaggtgtcagt

SEQ ID NO: 2110 - DNA, 17 bp, Homo sapiens
ggaacatgaagctcccc

SEQ ID NO: 2111 - DNA, 17 bp, Homo sapiens
agctctgggcagcacct

SEQ ID NO: 2112 - DNA, 17 bp, Homo sapiens
catgtggaaggagacat

SEQ ID NO: 2113 - DNA, 17 bp, Homo sapiens
ttcctcctaatccataa

SEQ ID NO: 2114 - DNA, 17 bp, Homo sapiens
ctcaagccccatgtgca

SEQ ID NO: 2115 - DNA, 17 bp, Homo sapiens
acctcaagcaggactaa

SEQ ID NO: 2116 - DNA, 17 bp, Homo sapiens
aagattcggagagagca

SEQ ID NO: 2117 - DNA, 17 bp, Homo sapiens
gtgagcccctccagcca

SEQ ID NO: 2118 - DNA, 17 bp, Homo sapiens
tggcccaggaagaagct

SEQ ID NO: 2119 - DNA, 17 bp, Homo sapiens
tctgagctcccccttgg

SEQ ID NO: 2120 - DNA, 17 bp, Homo sapiens
aagagtttgttctacat

SEQ ID NO: 2121 - DNA, 17 bp, Homo sapiens
tacatgtggcaaagcca

SEQ ID NO: 2122 - DNA, 17 bp, Homo sapiens
aagccagcaccatagag

SEQ ID NO: 2123 - DNA, 17 bp, Homo sapiens
catagaggggacagagg

SEQ ID NO: 2124 - DNA, 17 bp, Homo sapiens
cagaagacaacctggat

SEQ ID NO: 2125 - DNA, 17 bp, Homo sapiens
gacaacttctttgtgat

SEQ ID NO: 2126 - DNA, 17 bp, Homo sapiens
cgatactcgccagtgct

SEQ ID NO: 2127 - DNA, 17 bp, Homo sapiens
ctccgcatgaagtaggc

SEQ ID NO: 2128 - DNA, 17 bp, Homo sapiens
cttctcaactaccaaat

SEQ ID NO: 2129 - DNA, 17 bp, Homo sapiens
cattgtgtaatccatct

SEQ ID NO: 2130 - DNA, 17 bp, Homo sapiens
tgtaatccatctgcaac

SEQ ID NO: 2131 - DNA, 17 bp, Homo sapiens
taaaacctcctccctct

SEQ ID NO: 2132 - DNA, 17 bp, Homo sapiens
ctccctctgtttctcag

SEQ ID NO: 2133 - DNA, 17 bp, Homo sapiens
ggagggacaactgtcca

SEQ ID NO: 2134 - DNA, 17 bp, Homo sapiens
tggcaccgctgaagaaa

SEQ ID NO: 2135 - DNA, 17 bp, Homo sapiens
aaagctgcaaacgtact

SEQ ID NO: 2136 - DNA, 17 bp, Homo sapiens
tcagactgagaataaca

SEQ ID NO: 2137 - DNA, 17 bp, Homo sapiens
cagcttcgaaaggccac

SEQ ID NO: 2138 - DNA, 17 bp, Homo sapiens
ttaccgctccactgcta

SEQ ID NO: 2139 - DNA, 17 bp, Homo sapiens
tccccctctctccccca

SEQ ID NO: 2140 - DNA, 17 bp, Homo sapiens
tcagtcgtttttattca

SEQ ID NO: 2141 - DNA, 17 bp, Homo sapiens
ttacaattacaccataa

SEQ ID NO: 2142 - DNA, 17 bp, Homo sapiens
cagtctgagctaggaga

SEQ ID NO: 2143 - DNA, 17 bp, Homo sapiens
aggagagaatcagaatg

SEQ ID NO: 2144 - DNA, 17 bp, Homo sapiens
aaaatcttcacctacat

SEQ ID NO: 2145 - DNA, 17 bp, Homo sapiens
caaatgcagcttcccta

SEQ ID NO: 2146 - DNA, 17 bp, Homo sapiens
aaacagcttttctcctt

SEQ ID NO: 2147 - DNA, 17 bp, Homo sapiens
gctatgtgttcctgttt

SEQ ID NO: 2148 - DNA, 17 bp, Homo sapiens
tcctctggcgtgacctg

SEQ ID NO: 2149 - DNA, 17 bp, Homo sapiens
gattggtgaaggggaag

SEQ ID NO: 2150 - DNA, 17 bp, Homo sapiens
tcgataaaaataagaat

SEQ ID NO: 2151 - DNA, 17 bp, Homo sapiens
catgatccccttctgga

SEQ ID NO: 2152 - DNA, 17 bp, Homo sapiens
gctcggctgtggttgga

SEQ ID NO: 2153 - DNA, 17 bp, Homo sapiens
aaagcacaattattaga

SEQ ID NO: 2154 - DNA, 17 bp, Homo sapiens
agaggacagaaagggga

SEQ ID NO: 2155 - DNA, 17 bp, Homo sapiens
tgcatccttccgaagaa

SEQ ID NO: 2156 - DNA, 17 bp, Homo sapiens
tcacaccgccgcgcgcc

SEQ ID NO: 2157 - DNA, 17 bp, Homo sapiens
cgccgcgcgccgcgtct

SEQ ID NO: 2158 - DNA, 17 bp, Homo sapiens
gggtggggagagggagg

SEQ ID NO: 2159 - DNA, 17 bp, Homo sapiens
attattactattattgg

SEQ ID NO: 2160 - DNA, 17 bp, Homo sapiens
cgggcggacgacggctc

SEQ ID NO: 2161 - DNA, 17 bp, Homo sapiens
aggagtctggatggaca

SEQ ID NO: 2162 - DNA, 17 bp, Homo sapiens
gagtctggatggacaga

SEQ ID NO: 2163 - DNA, 17 bp, Homo sapiens
aaaagccatgacggctc

SEQ ID NO: 2164 - DNA, 17 bp, Homo sapiens
ggcgcgcggcggtgtga

SEQ ID NO: 2165 - DNA, 17 bp, Homo sapiens
gagcctcttgaagccat

SEQ ID NO: 2166 - DNA, 17 bp, Homo sapiens
agatgaacttcccattg

SEQ ID NO: 2167 - DNA, 17 bp, Homo sapiens
acattcttatttttatc

SEQ ID NO: 2168 - DNA, 17 bp, Homo sapiens
ttttatcgagcacaaac

SEQ ID NO: 2169 - DNA, 17 bp, Homo sapiens
atctagaggaatttgcc

SEQ ID NO: 2170 - DNA, 17 bp, Homo sapiens
aggaatttgccccaaac

SEQ ID NO: 2171 - DNA, 17 bp, Homo sapiens
gaatttgccccaaacag

SEQ ID NO: 2172 - DNA, 17 bp, Homo sapiens
ttgtgactggaaggaaa

SEQ ID NO: 2173 - DNA, 17 bp, Homo sapiens
taaatcaccaaatatgg

SEQ ID NO: 2174 - DNA, 17 bp, Homo sapiens
agcagttcaaatgaaat

SEQ ID NO: 2175 - DNA, 17 bp, Homo sapiens
aggagaccctcagggaa

SEQ ID NO: 2176 - DNA, 17 bp, Homo sapiens
tctagcagcttccggag

SEQ ID NO: 2177 - DNA, 17 bp, Homo sapiens
atggattaggaggaaga

SEQ ID NO: 2178 - DNA, 17 bp, Homo sapiens
agagtaccaggcagctt

SEQ ID NO: 2179 - DNA, 17 bp, Homo sapiens
cttaggaacatgtctcc

SEQ ID NO: 2180 - DNA, 17 bp, Homo sapiens
ggtgctgcccagagctg

SEQ ID NO: 2181 - DNA, 17 bp, Homo sapiens
tcatgttcctgggcctc

SEQ ID NO: 2182 - DNA, 17 bp, Homo sapiens
cctctcctcccctcgtt

SEQ ID NO: 2183 - DNA, 17 bp, Homo sapiens
gtaaagatgagcccagc

SEQ ID NO: 2184 - DNA, 17 bp, Homo sapiens
aaagatgagcccagcag

SEQ ID NO: 2185 - DNA, 17 bp, Homo sapiens
gagcccagcagctacac

SEQ ID NO: 2186 - DNA, 17 bp, Homo sapiens
ctacacatgtacaactt

SEQ ID NO: 2187 - DNA, 17 bp, Homo sapiens
cagtgcatggtttctct

SEQ ID NO: 2188 - DNA, 17 bp, Homo sapiens
atggtttctcttgcaac

SEQ ID NO: 2189 - DNA, 17 bp, Homo sapiens
ttctcttgcaacacgca

SEQ ID NO: 2190 - DNA, 17 bp, Homo sapiens
aagaatctacttagaaa

SEQ ID NO: 2191 - DNA, 17 bp, Homo sapiens
tccatgggattcatatt

SEQ ID NO: 2192 - DNA, 17 bp, Homo sapiens
cctgtttagtccaccac

SEQ ID NO: 2193 - DNA, 17 bp, Homo sapiens
cccatcacccgagtgcc

SEQ ID NO: 2194 - DNA, 17 bp, Homo sapiens
gacttagagagctggca

SEQ ID NO: 2195 - DNA, 17 bp, Homo sapiens
tggtggtgcaccggcgc

SEQ ID NO: 2196 - DNA, 17 bp, Homo sapiens
gccacacgggcgagaag

SEQ ID NO: 2197 - DNA, 17 bp, Homo sapiens
aggccagcaagctgaag

SEQ ID NO: 2198 - DNA, 17 bp, Homo sapiens
tgaagcgccacatgaag

SEQ ID NO: 2199 - DNA, 17 bp, Homo sapiens
gccacatgaagacgcac

SEQ ID NO: 2200 - DNA, 17 bp, Homo sapiens
aggcggcgcgccaccac

SEQ ID NO: 2201 - DNA, 17 bp, Homo sapiens
acctggccgaggccgag

SEQ ID NO: 2202 - DNA, 17 bp, Homo sapiens
ccgaggccgagggccac

SEQ ID NO: 2203 - DNA, 17 bp, Homo sapiens
tgcccccggccgcgatg

SEQ ID NO: 2204 - DNA, 17 bp, Homo sapiens
ccttagcttcggagact

SEQ ID NO: 2205 - DNA, 17 bp, Homo sapiens
aacgggagtttgcgctt

SEQ ID NO: 2206 - DNA, 17 bp, Homo sapiens
caaaagagggcagacgc

SEQ ID NO: 2207 - DNA, 17 bp, Homo sapiens
actgtagcaatctcact

SEQ ID NO: 2208 - DNA, 17 bp, Homo sapiens
tcactgtccacaggaga

SEQ ID NO: 2209 - DNA, 17 bp, Homo sapiens
agagtagcaagctcacc

SEQ ID NO: 2210 - DNA, 17 bp, Homo sapiens
gccaggtggggaaggac

SEQ ID NO: 2211 - DNA, 17 bp, Homo sapiens
gtaagatgccttttagc

SEQ ID NO: 2212 - DNA, 17 bp, Homo sapiens
cgtgtacagtaccctgg

SEQ ID NO: 2213 - DNA, 17 bp, Homo sapiens
tgtacagtaccctggag

SEQ ID NO: 2214 - DNA, 17 bp, Homo sapiens
agaaacacatgaaaaaa

SEQ ID NO: 2215 - DNA, 17 bp, Homo sapiens
cccctccctcactccca

SEQ ID NO: 2216 - DNA, 17 bp, Homo sapiens
ttctagtcccatgtgat

SEQ ID NO: 2217 - DNA, 17 bp, Homo sapiens
agtcccatgtgatttaa

SEQ ID NO: 2218 - DNA, 17 bp, Homo sapiens
ccatgtgatttaaacaa

SEQ ID NO: 2219 - DNA, 17 bp, Homo sapiens
gtgatttaaacaaacaa

SEQ ID NO: 2220 - DNA, 17 bp, Homo sapiens
tttaaacaaacaaacaa

SEQ ID NO: 2221 - DNA, 17 bp, Homo sapiens
atgagagtgcttgtcac

SEQ ID NO: 2222 - DNA, 17 bp, Homo sapiens
ctttctcttgtgcaata

SEQ ID NO: 2223 - DNA, 17 bp, Homo sapiens
tatgtttttttttaaac

SEQ ID NO: 2224 - DNA, 17 bp, Homo sapiens
ccctaattcgttgctga

SEQ ID NO: 2225 - DNA, 17 bp, Homo sapiens
gagaaaaagaccatgct

SEQ ID NO: 2226 - DNA, 17 bp, Homo sapiens
atgctgcatacattctg

SEQ ID NO: 2227 - DNA, 17 bp, Homo sapiens
attctgtaatacatatc

SEQ ID NO: 2228 - DNA, 17 bp, Homo sapiens
tttataacgtgaggagg

SEQ ID NO: 2229 - DNA, 17 bp, Homo sapiens
ctttggattaaccctct

SEQ ID NO: 2230 - DNA, 17 bp, Homo sapiens
aagaaaaaaggccttga

SEQ ID NO: 2231 - DNA, 17 bp, Homo sapiens
aggccttgaattgacaa

SEQ ID NO: 2232 - DNA, 17 bp, Homo sapiens
aattgacaaattaacag

SEQ ID NO: 2233 - DNA, 17 bp, Homo sapiens
acaaattaacagaaaaa

SEQ ID NO: 2234 - DNA, 17 bp, Homo sapiens
tgccttggatctattaa

SEQ ID NO: 2235 - DNA, 17 bp, Homo sapiens
taattctatattgtatt

SEQ ID NO: 2236 - DNA, 17 bp, Homo sapiens
ttctatattgtatttct

SEQ ID NO: 2237 - DNA, 17 bp, Homo sapiens
tcctttagtttaatttt

SEQ ID NO: 2238 - DNA, 17 bp, Homo sapiens
ccaaagttttatttttt

SEQ ID NO: 2239 - DNA, 17 bp, Homo sapiens
agccctggaacgcaatt

SEQ ID NO: 2240 - DNA, 17 bp, Homo sapiens
atctacttggttgtcaa

SEQ ID NO: 2241 - DNA, 17 bp, Homo sapiens
catattgaaaggaagag

SEQ ID NO: 2242 - DNA, 17 bp, Homo sapiens
agaggctgacaataagg

SEQ ID NO: 2243 - DNA, 17 bp, Homo sapiens
aataaggtttgacagag

SEQ ID NO: 2244 - DNA, 17 bp, Homo sapiens
aaaataatatgatttat

SEQ ID NO: 2245 - DNA, 17 bp, Homo sapiens
tatttgccatttaaaac

SEQ ID NO: 2246 - DNA, 17 bp, Homo sapiens
ggtatataagctaatat

SEQ ID NO: 2247 - DNA, 17 bp, Homo sapiens
taagacttgcatttaaa

SEQ ID NO: 2248 - DNA, 17 bp, Homo sapiens
tgtacttcatttctttt

SEQ ID NO: 2249 - DNA, 17 bp, Homo sapiens
cactgtgtgctatttgt

SEQ ID NO: 2250 - DNA, 17 bp, Homo sapiens
atcttttctctaatcag

SEQ ID NO: 2251 - DNA, 17 bp, Homo sapiens
aaataaacctgctcaga

SEQ ID NO: 2252 - DNA, 17 bp, Homo sapiens
taggacaattaagtgca

SEQ ID NO: 2253 - DNA, 17 bp, Homo sapiens
actgtacaattttccca

SEQ ID NO: 2254 - DNA, 17 bp, Homo sapiens
agaatgctgaaaaaaaa

SEQ ID NO: 2255 - DNA, 17 bp, Homo sapiens
aatgctgaaaaaaaatt

SEQ ID NO: 2256 - DNA, 17 bp, Homo sapiens
gagcttacttacttgga

SEQ ID NO: 2257 - DNA, 17 bp, Homo sapiens
ttgcaagcgctgtgaat

SEQ ID NO: 2258 - DNA, 17 bp, Homo sapiens
cgctgtgaatggaaaca

SEQ ID NO: 2259 - DNA, 17 bp, Homo sapiens
aatggaaacagaataca

SEQ ID NO: 2260 - DNA, 17 bp, Homo sapiens
tgaatgattgctttcgc

SEQ ID NO: 2261 - DNA, 17 bp, Homo sapiens
acagtgcaaggattttt

SEQ ID NO: 2262 - DNA, 17 bp, Homo sapiens
aagaaaaatttttttta

SEQ ID NO: 2263 - DNA, 17 bp, Homo sapiens
ttccattgtcttggtgg

SEQ ID NO: 2264 - DNA, 17 bp, Homo sapiens
tggaaattctatgcctt

SEQ ID NO: 2265 - DNA, 17 bp, Homo sapiens
gaaattctatgccttgg

SEQ ID NO: 2266 - DNA, 17 bp, Homo sapiens
ttcaggttgtaaaaaaa

SEQ ID NO: 2267 - DNA, 17 bp, Homo sapiens
ggttgtaaaaaaaaaaa

SEQ ID NO: 2268 - DNA, 17 bp, Homo sapiens
tacttaaatataggaaa

SEQ ID NO: 2269 - DNA, 17 bp, Homo sapiens
tgttgattcctatgcta

SEQ ID NO: 2270 - DNA, 17 bp, Homo sapiens
ttggtagtggaaaaaaa

SEQ ID NO: 2271 - DNA, 17 bp, Homo sapiens
aaaaaaaaaagacaggc

SEQ ID NO: 2272 - DNA, 17 bp, Homo sapiens
aaaaaaaaaaaaaagag

SEQ ID NO: 2273 - DNA, 17 bp, Homo sapiens
agagagaaacaaaaaag

SEQ ID NO: 2274 - DNA, 17 bp, Homo sapiens
gaaacaaaaaagtgtga

SEQ ID NO: 2275 - DNA, 17 bp, Homo sapiens
gggggagcctgctagaa

SEQ ID NO: 2276 - DNA, 17 bp, Homo sapiens
gatggctgtcatagggg

SEQ ID NO: 2277 - DNA, 17 bp, Homo sapiens
tccctttccttctatca

SEQ ID NO: 2278 - DNA, 17 bp, Homo sapiens
tgcttatgtgccctgtt

SEQ ID NO: 2279 - DNA, 17 bp, Homo sapiens
tttagatgaccaaaggt

SEQ ID NO: 2280 - DNA, 17 bp, Homo sapiens
tgtctgcattaacctgt

SEQ ID NO: 2281 - DNA, 17 bp, Homo sapiens
gctagtttgtgatgttt

SEQ ID NO: 2282 - DNA, 17 bp, Homo sapiens
ccaagaagccgttgtgc

SEQ ID NO: 2283 - DNA, 17 bp, Homo sapiens
attttttaataaaaagt

SEQ ID NO: 2284 - DNA, 17 bp, Homo sapiens
ataaaaagtaaaaacaa

SEQ ID NO: 2285 - DNA, 17 bp, Homo sapiens
taaaaacaaaaaaacag

SEQ ID NO: 2286 - DNA, 17 bp, Homo sapiens
aaaaaacagacccacat

SEQ ID NO: 2287 - DNA, 17 bp, Homo sapiens
tccccaaccccttgttt

SEQ ID NO: 2288 - DNA, 17 bp, Homo sapiens
gtcttttaaaaagtgtg

SEQ ID NO: 2289 - DNA, 17 bp, Homo sapiens
taaaaagtgtgcttaac

SEQ ID NO: 2290 - DNA, 17 bp, Homo sapiens
aaaagtgtgcttaacat

SEQ ID NO: 2291 - DNA, 17 bp, Homo sapiens
ttaatttttaatgctta

SEQ ID NO: 2292 - DNA, 17 bp, Homo sapiens
gtacttctgtacctgtt

SEQ ID NO: 2293 - DNA, 17 bp, Homo sapiens
ttctgtacctgtttcct

SEQ ID NO: 2294 - DNA, 17 bp, Homo sapiens
cccatcgggtgggtagg

SEQ ID NO: 2295 - DNA, 17 bp, Homo sapiens
tttaatttagcttagga

SEQ ID NO: 2296 - DNA, 17 bp, Homo sapiens
aggaaatatatcttaat

SEQ ID NO: 2297 - DNA, 17 bp, Homo sapiens
aatatatcttaatgcag

SEQ ID NO: 2298 - DNA, 17 bp, Homo sapiens
tatcttaatgcagacaa

SEQ ID NO: 2299 - DNA, 17 bp, Homo sapiens
cataaaacttctttagt

SEQ ID NO: 2300 - DNA, 17 bp, Homo sapiens
attataggaggaaagaa

SEQ ID NO: 2301 - DNA, 17 bp, Homo sapiens
aggaaagaagttcacat

SEQ ID NO: 2302 - DNA, 17 bp, Homo sapiens
aagaagttcacatcaga

SEQ ID NO: 2303 - DNA, 17 bp, Homo sapiens
ttcacatcagaacagac

SEQ ID NO: 2304 - DNA, 17 bp, Homo sapiens
tattccttagaaattag

SEQ ID NO: 2305 - DNA, 17 bp, Homo sapiens
aattagtgccacaaata

SEQ ID NO: 2306 - DNA, 17 bp, Homo sapiens
tgccacaaataagttac

SEQ ID NO: 2307 - DNA, 17 bp, Homo sapiens
acaaataagttacatct

SEQ ID NO: 2308 - DNA, 17 bp, Homo sapiens
tttctggcccagttaat

SEQ ID NO: 2309 - DNA, 17 bp, Homo sapiens
agatccagaagagaatt

SEQ ID NO: 2310 - DNA, 17 bp, Homo sapiens
tccagaagagaattaga

SEQ ID NO: 2311 - DNA, 17 bp, Homo sapiens
tttgtcaataatagagc

SEQ ID NO: 2312 - DNA, 17 bp, Homo sapiens
acacctgtgtgctgtag

SEQ ID NO: 2313 - DNA, 17 bp, Homo sapiens
ctgtgtgctgtagattc

SEQ ID NO: 2314 - DNA, 17 bp, Homo sapiens
tgaataagcaggaaata

SEQ ID NO: 2315 - DNA, 17 bp, Homo sapiens
tcacggcctgtatgtga

SEQ ID NO: 2316 - DNA, 17 bp, Homo sapiens
gcctgtatgtgaatcta

SEQ ID NO: 2317 - DNA, 17 bp, Homo sapiens
ctgtatgtgaatctaca

SEQ ID NO: 2318 - DNA, 17 bp, Homo sapiens
ggtgtctgagctctatt

SEQ ID NO: 2319 - DNA, 17 bp, Homo sapiens
atatttaataagaaact

SEQ ID NO: 2320 - DNA, 17 bp, Homo sapiens
tttcctaagctaaatta

SEQ ID NO: 2321 - DNA, 17 bp, Homo sapiens
ccaaaagcatatatttg

SEQ ID NO: 2322 - DNA, 17 bp, Homo sapiens
ggtatgcaaattataag

SEQ ID NO: 2323 - DNA, 17 bp, Homo sapiens
agtcagacagttaggaa

SEQ ID NO: 2324 - DNA, 17 bp, Homo sapiens
accacacttcagcatta

SEQ ID NO: 2325 - DNA, 17 bp, Homo sapiens
ataaacagcaatattac

SEQ ID NO: 2326 - DNA, 17 bp, Homo sapiens
cggtaacctagttcccc

SEQ ID NO: 2327 - DNA, 17 bp, Homo sapiens
cccgatgggtgtctgta

SEQ ID NO: 2328 - DNA, 17 bp, Homo sapiens
gggtgtctgtaggaaac

SEQ ID NO: 2329 - DNA, 17 bp, Homo sapiens
gtaggaaacaggtacag

SEQ ID NO: 2330 - DNA, 17 bp, Homo sapiens
ataagcattaaaaatta

SEQ ID NO: 2331 - DNA, 17 bp, Homo sapiens
taaaaattaaagaacaa

SEQ ID NO: 2332 - DNA, 17 bp, Homo sapiens
caaacaccacctaaagc

SEQ ID NO: 2333 - DNA, 17 bp, Homo sapiens
tttattgtgtcaatgtt

SEQ ID NO: 2334 - DNA, 17 bp, Homo sapiens
gttaagcacacttttta

SEQ ID NO: 2335 - DNA, 17 bp, Homo sapiens
aagcacactttttaaaa

SEQ ID NO: 2336 - DNA, 17 bp, Homo sapiens
gacaacatagaatgtat

SEQ ID NO: 2337 - DNA, 17 bp, Homo sapiens
tggggactcatgcgcat

SEQ ID NO: 2338 - DNA, 17 bp, Homo sapiens
actcatgcgcatttcca

SEQ ID NO: 2339 - DNA, 17 bp, Homo sapiens
agggccagggcatcact

SEQ ID NO: 2340 - DNA, 17 bp, Homo sapiens
tctgcaggactctgtct

SEQ ID NO: 2341 - DNA, 17 bp, Homo sapiens
cttggaggctactgtca

SEQ ID NO: 2342 - DNA, 17 bp, Homo sapiens
aggctactgtcagaaaa

SEQ ID NO: 2343 - DNA, 17 bp, Homo sapiens
acatcacaaactagcag

SEQ ID NO: 2344 - DNA, 17 bp, Homo sapiens
agcttccatccgaaaac

SEQ ID NO: 2345 - DNA, 17 bp, Homo sapiens
cttccatccgaaaactg

SEQ ID NO: 2346 - DNA, 17 bp, Homo sapiens
ttttattttttcaataa

SEQ ID NO: 2347 - DNA, 17 bp, Homo sapiens
agggacaaaatgggtgt

SEQ ID NO: 2348 - DNA, 17 bp, Homo sapiens
tgtatgaacaggttaat

SEQ ID NO: 2349 - DNA, 17 bp, Homo sapiens
atgcagacaactgccaa

SEQ ID NO: 2350 - DNA, 17 bp, Homo sapiens
gcagacaactgccaaaa

SEQ ID NO: 2351 - DNA, 17 bp, Homo sapiens
acaactgccaaaaaaac

SEQ ID NO: 2352 - DNA, 17 bp, Homo sapiens
tggtttttccaatagaa

SEQ ID NO: 2353 - DNA, 17 bp, Homo sapiens
agaacttaacaaagacc

SEQ ID NO: 2354 - DNA, 17 bp, Homo sapiens
taacaaagaccagaaac

SEQ ID NO: 2355 - DNA, 17 bp, Homo sapiens
taaataaaaaaaaaaat

SEQ ID NO: 2356 - DNA, 17 bp, Homo sapiens
aattaagtgcctctgtt

SEQ ID NO: 2357 - DNA, 17 bp, Homo sapiens
tgcctctgttttgaaca

SEQ ID NO: 2358 - DNA, 17 bp, Homo sapiens
aagataaaatttcaagt

SEQ ID NO: 2359 - DNA, 17 bp, Homo sapiens
taaaatttcaagttacg

SEQ ID NO: 2360 - DNA, 17 bp, Homo sapiens
ttacgacaaacagcttt

SEQ ID NO: 2361 - DNA, 17 bp, Homo sapiens
caggaatagaaaaggcc

SEQ ID NO: 2362 - DNA, 17 bp, Homo sapiens
aaatattctgcattgcc

SEQ ID NO: 2363 - DNA, 17 bp, Homo sapiens
ggcaatgaaaaaaactg

SEQ ID NO: 2364 - DNA, 17 bp, Homo sapiens
tagggtgatagaaggaa

SEQ ID NO: 2365 - DNA, 17 bp, Homo sapiens
agaaggaaagggacaaa

SEQ ID NO: 2366 - DNA, 17 bp, Homo sapiens
gaaagggacaaaaagca

SEQ ID NO: 2367 - DNA, 17 bp, Homo sapiens
ggacaaaaagcacacta

SEQ ID NO: 2368 - DNA, 17 bp, Homo sapiens
tattagcttgcagtact

SEQ ID NO: 2369 - DNA, 17 bp, Homo sapiens
gtatggcagcaggaaaa

SEQ ID NO: 2370 - DNA, 17 bp, Homo sapiens
aaggaacaaaaaaggat

SEQ ID NO: 2371 - DNA, 17 bp, Homo sapiens
aggatatgtacaacccc

SEQ ID NO: 2372 - DNA, 17 bp, Homo sapiens
cctatgacagccatcca

SEQ ID NO: 2373 - DNA, 17 bp, Homo sapiens
tggcttctcatctgtaa

SEQ ID NO: 2374 - DNA, 17 bp, Homo sapiens
ttttttttttttttgaa

SEQ ID NO: 2375 - DNA, 17 bp, Homo sapiens
ttttccactaccaaaaa

SEQ ID NO: 2376 - DNA, 17 bp, Homo sapiens
acattgataccttttaa

SEQ ID NO: 2377 - DNA, 17 bp, Homo sapiens
taccttttaagagaaca

SEQ ID NO: 2378 - DNA, 17 bp, Homo sapiens
gaacaagcaacagttaa

SEQ ID NO: 2379 - DNA, 17 bp, Homo sapiens
atataaatactatagtg

SEQ ID NO: 2380 - DNA, 17 bp, Homo sapiens
atagtgcctaacactag

SEQ ID NO: 2381 - DNA, 17 bp, Homo sapiens
ttcaaataccattctag

SEQ ID NO: 2382 - DNA, 17 bp, Homo sapiens
tgtattttagcatagga

SEQ ID NO: 2383 - DNA, 17 bp, Homo sapiens
caatgtatgtttttttt

SEQ ID NO: 2384 - DNA, 17 bp, Homo sapiens
actaccatttttaaatg

SEQ ID NO: 2385 - DNA, 17 bp, Homo sapiens
aaatggataacaagtct

SEQ ID NO: 2386 - DNA, 17 bp, Homo sapiens
aagtcttgtaacaccac

SEQ ID NO: 2387 - DNA, 17 bp, Homo sapiens
taaaatgcagttccccc

SEQ ID NO: 2388 - DNA, 17 bp, Homo sapiens
ttttaaaaaaaattttt

SEQ ID NO: 2389 - DNA, 17 bp, Homo sapiens
ttatatttaaaaaagtt

SEQ ID NO: 2390 - DNA, 17 bp, Homo sapiens
aagtgtattctgtttcc

SEQ ID NO: 2391 - DNA, 17 bp, Homo sapiens
cctgtaaactgggaaaa

SEQ ID NO: 2392 - DNA, 17 bp, Homo sapiens
atctctgattagagaaa

SEQ ID NO: 2393 - DNA, 17 bp, Homo sapiens
tagagaaaagatacaga

SEQ ID NO: 2394 - DNA, 17 bp, Homo sapiens
gcagagtcaagtgctat

SEQ ID NO: 2395 - DNA, 17 bp, Homo sapiens
attaaaaaaataaaaat

SEQ ID NO: 2396 - DNA, 17 bp, Homo sapiens
aatgaatcctcttccat

SEQ ID NO: 2397 - DNA, 17 bp, Homo sapiens
tgaatcctcttccatgt

SEQ ID NO: 2398 - DNA, 17 bp, Homo sapiens
ttccatgttaacacaaa

SEQ ID NO: 2399 - DNA, 17 bp, Homo sapiens
ccatgttaacacaaata

SEQ ID NO: 2400 - DNA, 17 bp, Homo sapiens
tgtatggaaaagaaatg

SEQ ID NO: 2401 - DNA, 17 bp, Homo sapiens
gaagtacaacttttagg

SEQ ID NO: 2402 - DNA, 17 bp, Homo sapiens
tacaacttttagggagc

SEQ ID NO: 2403 - DNA, 17 bp, Homo sapiens
tcttctttttttaagaa

SEQ ID NO: 2404 - DNA, 17 bp, Homo sapiens
ctcttcctttcaatatg

SEQ ID NO: 2405 - DNA, 17 bp, Homo sapiens
tatcatttgattgtcca

SEQ ID NO: 2406 - DNA, 17 bp, Homo sapiens
ggtgccagtatttttaa

SEQ ID NO: 2407 - DNA, 17 bp, Homo sapiens
attgcgttccagggctt

SEQ ID NO: 2408 - DNA, 17 bp, Homo sapiens
gttccagggcttttgca

SEQ ID NO: 2409 - DNA, 17 bp, Homo sapiens
tccagggcttttgcaca

SEQ ID NO: 2410 - DNA, 17 bp, Homo sapiens
aaaaataaaactttggg

SEQ ID NO: 2411 - DNA, 17 bp, Homo sapiens
gaaaaatgatgattaac

SEQ ID NO: 2412 - DNA, 17 bp, Homo sapiens
gtagccattgttgtgag

SEQ ID NO: 2413 - DNA, 17 bp, Homo sapiens
cacccaatgctgaatta

SEQ ID NO: 2414 - DNA, 17 bp, Homo sapiens
gaattaagctacaagtt

SEQ ID NO: 2415 - DNA, 17 bp, Homo sapiens
ttttcttcctttccaat

SEQ ID NO: 2416 - DNA, 17 bp, Homo sapiens
gatacatttaacccttt

SEQ ID NO: 2417 - DNA, 17 bp, Homo sapiens
catttaaccctttagag

SEQ ID NO: 2418 - DNA, 17 bp, Homo sapiens
cacgttataaaataaaa

SEQ ID NO: 2419 - DNA, 17 bp, Homo sapiens
aaactgtacatgatatg

SEQ ID NO: 2420 - DNA, 17 bp, Homo sapiens
tctctcagaacggaact

SEQ ID NO: 2421 - DNA, 17 bp, Homo sapiens
agaacggaactggaaac

SEQ ID NO: 2422 - DNA, 17 bp, Homo sapiens
ttgctcagcaacgaatt

SEQ ID NO: 2423 - DNA, 17 bp, Homo sapiens
ggacaatttaaaatagc

SEQ ID NO: 2424 - DNA, 17 bp, Homo sapiens
aaaatagccataacata

SEQ ID NO: 2425 - DNA, 17 bp, Homo sapiens
gctgtctaagtttaaaa

SEQ ID NO: 2426 - DNA, 17 bp, Homo sapiens
tctaagtttaaaaaaaa

SEQ ID NO: 2427 - DNA, 17 bp, Homo sapiens
taagtttaaaaaaaaac

SEQ ID NO: 2428 - DNA, 17 bp, Homo sapiens
gtttaaaaaaaaacata

SEQ ID NO: 2429 - DNA, 17 bp, Homo sapiens
acacaacatgtaaatta

SEQ ID NO: 2430 - DNA, 17 bp, Homo sapiens
aatgcaatagtattgcc

SEQ ID NO: 2431 - DNA, 17 bp, Homo sapiens
tcatgcattcaaacggt

SEQ ID NO: 2432 - DNA, 17 bp, Homo sapiens
agaaaaagaaaaagaaa

SEQ ID NO: 2433 - DNA, 17 bp, Homo sapiens
aaaaaaacaggtgtgct

SEQ ID NO: 2434 - DNA, 17 bp, Homo sapiens
gtttgtttgtttgttta

SEQ ID NO: 2435 - DNA, 17 bp, Homo sapiens
atgggactagaaaaaaa

SEQ ID NO: 2436 - DNA, 17 bp, Homo sapiens
cagtttttatatcatta

SEQ ID NO: 2437 - DNA, 17 bp, Homo sapiens
tgtgtttctccagggta

SEQ ID NO: 2438 - DNA, 17 bp, Homo sapiens
gtacacgctaaaaggca

SEQ ID NO: 2439 - DNA, 17 bp, Homo sapiens
aaaaggcatcttacaaa

SEQ ID NO: 2440 - DNA, 17 bp, Homo sapiens
ggtgagcttgctactct

SEQ ID NO: 2441 - DNA, 17 bp, Homo sapiens
tctgggcacaggcatag

SEQ ID NO: 2442 - DNA, 17 bp, Homo sapiens
cccgtgtggcttctcct

SEQ ID NO: 2443 - DNA, 17 bp, Homo sapiens
cctgtggacagtgagat

SEQ ID NO: 2444 - DNA, 17 bp, Homo sapiens
acagttcttgaagactt

SEQ ID NO: 2445 - DNA, 17 bp, Homo sapiens
gaagactttcccacagt

SEQ ID NO: 2446 - DNA, 17 bp, Homo sapiens
agccggcgagccactgc

SEQ ID NO: 2447 - DNA, 17 bp, Homo sapiens
tgcccagcagcagcttt

SEQ ID NO: 2448 - DNA, 17 bp, Homo sapiens
ggggagcagccgcggcc

SEQ ID NO: 2449 - DNA, 17 bp, Homo sapiens
cctgggtgcacgcgtgg

SEQ ID NO: 2450 - DNA, 17 bp, Homo sapiens
tagggctgggccggcct

SEQ ID NO: 2451 - DNA, 17 bp, Homo sapiens
gatgtctcggtggtgga

SEQ ID NO: 2452 - DNA, 17 bp, Homo sapiens
atggagaggtggctggg

SEQ ID NO: 2453 - DNA, 17 bp, Homo sapiens
gaatggctgtttgcaag

SEQ ID NO: 2454 - DNA, 17 bp, Homo sapiens
ctcaatgggccctcaat

SEQ ID NO: 2455 - DNA, 17 bp, Homo sapiens
atgggccctcaatcagc

SEQ ID NO: 2456 - DNA, 17 bp, Homo sapiens
gggccctcaatcagcac

SEQ ID NO: 2457 - DNA, 17 bp, Homo sapiens
gccctcaatcagcacat

SEQ ID NO: 2458 - DNA, 17 bp, Homo sapiens
ctccccggaccaaaggg

SEQ ID NO: 2459 - DNA, 17 bp, Homo sapiens
gagtggagaggctgctg

SEQ ID NO: 2460 - DNA, 17 bp, Homo sapiens
gctctgggcagcacctg

SEQ ID NO: 2461 - DNA, 17 bp, Homo sapiens
ggccacagcatgtggaa

SEQ ID NO: 2462 - DNA, 17 bp, Homo sapiens
gaagcgttgctaggaga

SEQ ID NO: 2463 - DNA, 17 bp, Homo sapiens
ggagaatggacacggca

SEQ ID NO: 2464 - DNA, 17 bp, Homo sapiens
ggaagaagctggcgctc

SEQ ID NO: 2465 - DNA, 17 bp, Homo sapiens
tccctgagggtctcctt

SEQ ID NO: 2466 - DNA, 17 bp, Homo sapiens
tatgcccagaactggag

SEQ ID NO: 2467 - DNA, 17 bp, Homo sapiens
ctgctatcgaagaatat

SEQ ID NO: 2468 - DNA, 17 bp, Homo sapiens
tacaccataaggtacac

SEQ ID NO: 2469 - DNA, 17 bp, Homo sapiens
ggctttggatctccgaa

SEQ ID NO: 2470 - DNA, 17 bp, Homo sapiens
ttgcttcattaatcatg

SEQ ID NO: 2471 - DNA, 17 bp, Homo sapiens
ctgttcattttccttcc

SEQ ID NO: 2472 - DNA, 17 bp, Homo sapiens
cattttccttccagtca

SEQ ID NO: 2473 - DNA, 17 bp, Homo sapiens
tttccttccagtcacaa

SEQ ID NO: 2474 - DNA, 17 bp, Homo sapiens
tccttccagtcacaaga

SEQ ID NO: 2475 - DNA, 17 bp, Homo sapiens
cacatggaaatggtcat

SEQ ID NO: 2476 - DNA, 17 bp, Homo sapiens
tcctctagatgacgttg

SEQ ID NO: 2477 - DNA, 17 bp, Homo sapiens
gaaggggaaggtggctt

SEQ ID NO: 2478 - DNA, 17 bp, Homo sapiens
gaagttcatctggcact

SEQ ID NO: 2479 - DNA, 17 bp, Homo sapiens
gtttgccttgcttgcgg

SEQ ID NO: 2480 - DNA, 17 bp, Homo sapiens
gggcggacgacggctcg

SEQ ID NO: 2481 - DNA, 17 bp, Homo sapiens
tatcttcatcagtgcct

SEQ ID NO: 2482 - DNA, 17 bp, Homo sapiens
ccaaaataaattagaaa

SEQ ID NO: 2483 - DNA, 17 bp, Homo sapiens
tattttggatgtcaaaa

SEQ ID NO: 2484 - DNA, 17 bp, Homo sapiens
cgccgccgccgccgccc

SEQ ID NO: 2485 - DNA, 17 bp, Homo sapiens
ccgccgccgcccgcccc

SEQ ID NO: 2486 - DNA, 17 bp, Homo sapiens
agcaaacgggaattctc

SEQ ID NO: 2487 - DNA, 17 bp, Homo sapiens
ccattcttacagatgat

SEQ ID NO: 2488 - DNA, 17 bp, Homo sapiens
accacggcccgttggga

SEQ ID NO: 2489 - DNA, 17 bp, Homo sapiens
ctcctcacctgtgggca

SEQ ID NO: 2490 - DNA, 17 bp, Homo sapiens
caatcgagatgaaaaaa

SEQ ID NO: 2491 - DNA, 17 bp, Homo sapiens
gtcatctagaggaattt

SEQ ID NO: 2492 - DNA, 17 bp, Homo sapiens
ggaatttgccccaaaca

SEQ ID NO: 2493 - DNA, 17 bp, Homo sapiens
gatttgtcgtcttcgga

SEQ ID NO: 2494 - DNA, 17 bp, Homo sapiens
ctggaggatgtatttgt

SEQ ID NO: 2495 - DNA, 17 bp, Homo sapiens
ggcctcagcactggcga

SEQ ID NO: 2496 - DNA, 17 bp, Homo sapiens
tgcaaaggtccagccct

SEQ ID NO: 2497 - DNA, 17 bp, Homo sapiens
agccctgtcgccaagga

SEQ ID NO: 2498 - DNA, 17 bp, Homo sapiens
ctattcccacggcccct

SEQ ID NO: 2499 - DNA, 17 bp, Homo sapiens
ttggccagtttgccata

SEQ ID NO: 2500 - DNA, 17 bp, Homo sapiens
cggtggctgctctctcc

SEQ ID NO: 2501 - DNA, 17 bp, Homo sapiens
gtctagcagcttccgga

SEQ ID NO: 2502 - DNA, 17 bp, Homo sapiens
catggggcttgaggtct

SEQ ID NO: 2503 - DNA, 17 bp, Homo sapiens
agatggcagagtaccag

SEQ ID NO: 2504 - DNA, 17 bp, Homo sapiens
gtctccttccacatgct

SEQ ID NO: 2505 - DNA, 17 bp, Homo sapiens
catgctgtggcccaggt

SEQ ID NO: 2506 - DNA, 17 bp, Homo sapiens
aggtgctgcccagagct

SEQ ID NO: 2507 - DNA, 17 bp, Homo sapiens
gggagcttcatgttcct

SEQ ID NO: 2508 - DNA, 17 bp, Homo sapiens
tgttcctgggcctcact

SEQ ID NO: 2509 - DNA, 17 bp, Homo sapiens
ttccagaaggggtaact

SEQ ID NO: 2510 - DNA, 17 bp, Homo sapiens
ttttgacttttagggaa

SEQ ID NO: 2511 - DNA, 17 bp, Homo sapiens
ggatgagtgcagaatat

SEQ ID NO: 2512 - DNA, 17 bp, Homo sapiens
taaagatgagcccagca

SEQ ID NO: 2513 - DNA, 17 bp, Homo sapiens
gtatcccttcaggacta

SEQ ID NO: 2514 - DNA, 17 bp, Homo sapiens
cagccacctctccatgg

SEQ ID NO: 2515 - DNA, 17 bp, Homo sapiens
caccgagacatcacttg

SEQ ID NO: 2516 - DNA, 17 bp, Homo sapiens
accgcatagagcgcctg

SEQ ID NO: 2517 - DNA, 17 bp, Homo sapiens
cggaagagatggccctg

SEQ ID NO: 2518 - DNA, 17 bp, Homo sapiens
gacagggtgctgcggtt

SEQ ID NO: 2519 - DNA, 17 bp, Homo sapiens
gccatggatttctctag

SEQ ID NO: 2520 - DNA, 17 bp, Homo sapiens
caggccagcaagctgaa

SEQ ID NO: 2521 - DNA, 17 bp, Homo sapiens
ctgaagcgccacatgaa

SEQ ID NO: 2522 - DNA, 17 bp, Homo sapiens
acgcacatgcacaaatc

SEQ ID NO: 2523 - DNA, 17 bp, Homo sapiens
gcgcgctcaagtccgtg

SEQ ID NO: 2524 - DNA, 17 bp, Homo sapiens
agttcaagagcgagaac

SEQ ID NO: 2525 - DNA, 17 bp, Homo sapiens
gaggaagaggaggagga

SEQ ID NO: 2526 - DNA, 17 bp, Homo sapiens
gacgtcatgcagggcat

SEQ ID NO: 2527 - DNA, 17 bp, Homo sapiens
caccaggtcctgggcga

SEQ ID NO: 2528 - DNA, 17 bp, Homo sapiens
agcgcggccacctggcc

SEQ ID NO: 2529 - DNA, 17 bp, Homo sapiens
cacctggccgaggccga

SEQ ID NO: 2530 - DNA, 17 bp, Homo sapiens
gggccacagggacactt

SEQ ID NO: 2531 - DNA, 17 bp, Homo sapiens
aagactcggtggccggc

SEQ ID NO: 2532 - DNA, 17 bp, Homo sapiens
tcggtggccggcgagtc

SEQ ID NO: 2533 - DNA, 17 bp, Homo sapiens
gacctgcccccggccgc

SEQ ID NO: 2534 - DNA, 17 bp, Homo sapiens
ggctacgcggcctccag

SEQ ID NO: 2535 - DNA, 17 bp, Homo sapiens
caaagatcccttcctta

SEQ ID NO: 2536 - DNA, 17 bp, Homo sapiens
ctggacggagggatctc

SEQ ID NO: 2537 - DNA, 17 bp, Homo sapiens
ggaagtggagggagcac

SEQ ID NO: 2538 - DNA, 17 bp, Homo sapiens
gtgtacagtaccctgga

SEQ ID NO: 2539 - DNA, 17 bp, Homo sapiens
caaacaaacaaacagaa

SEQ ID NO: 2540 - DNA, 17 bp, Homo sapiens
aaacaaacagaagtaac

SEQ ID NO: 2541 - DNA, 17 bp, Homo sapiens
tatggctattttaaatt

SEQ ID NO: 2542 - DNA, 17 bp, Homo sapiens
taaattgtccctaattc

SEQ ID NO: 2543 - DNA, 17 bp, Homo sapiens
agagagaaaaagaccat

SEQ ID NO: 2544 - DNA, 17 bp, Homo sapiens
ctatgagctaaatgtct

SEQ ID NO: 2545 - DNA, 17 bp, Homo sapiens
ctacttgttataaactt

SEQ ID NO: 2546 - DNA, 17 bp, Homo sapiens
tatttctcacaacaatg

SEQ ID NO: 2547 - DNA, 17 bp, Homo sapiens
taatgtgcaaaagccct

SEQ ID NO: 2548 - DNA, 17 bp, Homo sapiens
gtctttttaaaaatact

SEQ ID NO: 2549 - DNA, 17 bp, Homo sapiens
tctttttaaaaatactg

SEQ ID NO: 2550 - DNA, 17 bp, Homo sapiens
tggcaccaaaagaaata

SEQ ID NO: 2551 - DNA, 17 bp, Homo sapiens
taccatattgaaaggaa

SEQ ID NO: 2552 - DNA, 17 bp, Homo sapiens
ataaggtttgacagagg

SEQ ID NO: 2553 - DNA, 17 bp, Homo sapiens
gcagtatatatgtctgt

SEQ ID NO: 2554 - DNA, 17 bp, Homo sapiens
tcttttctctaatcaga

SEQ ID NO: 2555 - DNA, 17 bp, Homo sapiens
tgcaagcgctgtgaatg

SEQ ID NO: 2556 - DNA, 17 bp, Homo sapiens
ggaaattctatgccttg

SEQ ID NO: 2557 - DNA, 17 bp, Homo sapiens
aaatgcacactcatgtt

SEQ ID NO: 2558 - DNA, 17 bp, Homo sapiens
gtgcaaattatttgtat

SEQ ID NO: 2559 - DNA, 17 bp, Homo sapiens
aaaaaaaaaaaaagaga

SEQ ID NO: 2560 - DNA, 17 bp, Homo sapiens
tatcaccctacattcca

SEQ ID NO: 2561 - DNA, 17 bp, Homo sapiens
gccctgttcaaaacaga

SEQ ID NO: 2562 - DNA, 17 bp, Homo sapiens
gggtggggtggacgcgt

SEQ ID NO: 2563 - DNA, 17 bp, Homo sapiens
gatgttttctgacagta

SEQ ID NO: 2564 - DNA, 17 bp, Homo sapiens
gtaaaaacaaaaaaaca

SEQ ID NO: 2565 - DNA, 17 bp, Homo sapiens
attggaacagtgaatca

SEQ ID NO: 2566 - DNA, 17 bp, Homo sapiens
tgtggaaatgcgcatga

SEQ ID NO: 2567 - DNA, 17 bp, Homo sapiens
gcttataagacaatgag

SEQ ID NO: 2568 - DNA, 17 bp, Homo sapiens
tttgtacttctgtacct

SEQ ID NO: 2569 - DNA, 17 bp, Homo sapiens
tgtacctgtttcctaca

SEQ ID NO: 2570 - DNA, 17 bp, Homo sapiens
ccatcgggtgggtagga

SEQ ID NO: 2571 - DNA, 17 bp, Homo sapiens
gcataaattttcaagga

SEQ ID NO: 2572 - DNA, 17 bp, Homo sapiens
ggtgataaatgtcagta

SEQ ID NO: 2573 - DNA, 17 bp, Homo sapiens
taaatattctaatttta

SEQ ID NO: 2574 - DNA, 17 bp, Homo sapiens
aaatattctaattttag

SEQ ID NO: 2575 - DNA, 17 bp, Homo sapiens
cttacatcaggaaattt

SEQ ID NO: 2576 - DNA, 17 bp, Homo sapiens
ctattccttagaaatta

SEQ ID NO: 2577 - DNA, 17 bp, Homo sapiens
attccttagaaattagt

SEQ ID NO: 2578 - DNA, 17 bp, Homo sapiens
attttttactgcttgga

SEQ ID NO: 2579 - DNA, 17 bp, Homo sapiens
gacacctgtgtgctgta

SEQ ID NO: 2580 - DNA, 17 bp, Homo sapiens
attcacatacaggccgt

SEQ ID NO: 2581 - DNA, 17 bp, Homo sapiens
gaatctacagcacacag

SEQ ID NO: 2582 - DNA, 17 bp, Homo sapiens
ttttaatttgctatgtt

SEQ ID NO: 2583 - DNA, 17 bp, Homo sapiens
ttctgtgcaaattaact

SEQ ID NO: 2584 - DNA, 17 bp, Homo sapiens
accacctgtttgtagat

SEQ ID NO: 2585 - DNA, 17 bp, Homo sapiens
agatgtaacttatttgt

SEQ ID NO: 2586 - DNA, 17 bp, Homo sapiens
tcccccctctaaaatct

SEQ ID NO: 2587 - DNA, 17 bp, Homo sapiens
tatttcctgaaggtttg

SEQ ID NO: 2588 - DNA, 17 bp, Homo sapiens
atttcctgaaggtttgg

SEQ ID NO: 2589 - DNA, 17 bp, Homo sapiens
tcaaatcctgcatggta

SEQ ID NO: 2590 - DNA, 17 bp, Homo sapiens
gaaaaacaggattcggc

SEQ ID NO: 2591 - DNA, 17 bp, Homo sapiens
atgccatctgataagcg

SEQ ID NO: 2592 - DNA, 17 bp, Homo sapiens
ggtgtctgtaggaaaca

SEQ ID NO: 2593 - DNA, 17 bp, Homo sapiens
atagaaacaaggggttg

SEQ ID NO: 2594 - DNA, 17 bp, Homo sapiens
ggtaattaggttggctg

SEQ ID NO: 2595 - DNA, 17 bp, Homo sapiens
ccacgggccctctctat

SEQ ID NO: 2596 - DNA, 17 bp, Homo sapiens
ccaccccacccctgggg

SEQ ID NO: 2597 - DNA, 17 bp, Homo sapiens
gcttccatccgaaaact

SEQ ID NO: 2598 - DNA, 17 bp, Homo sapiens
tttattttttcaataaa

SEQ ID NO: 2599 - DNA, 17 bp, Homo sapiens
gaacttaacaaagacca

SEQ ID NO: 2600 - DNA, 17 bp, Homo sapiens
gcctctgttttgaacag

SEQ ID NO: 2601 - DNA, 17 bp, Homo sapiens
aagcaataataaatagt

SEQ ID NO: 2602 - DNA, 17 bp, Homo sapiens
agggtgatagaaggaaa

SEQ ID NO: 2603 - DNA, 17 bp, Homo sapiens
tatggcagcaggaaaaa

SEQ ID NO: 2604 - DNA, 17 bp, Homo sapiens
caaaccgccattatatg

SEQ ID NO: 2605 - DNA, 17 bp, Homo sapiens
ctctttttttttttttt

SEQ ID NO: 2606 - DNA, 17 bp, Homo sapiens
tcaatataaatactata

SEQ ID NO: 2607 - DNA, 17 bp, Homo sapiens
aacctgaagagcggtgt

SEQ ID NO: 2608 - DNA, 17 bp, Homo sapiens
acaccaccaagacaatg

SEQ ID NO: 2609 - DNA, 17 bp, Homo sapiens
aaaatccttgcactgta

SEQ ID NO: 2610 - DNA, 17 bp, Homo sapiens
acagcgcttgcaatgtt

SEQ ID NO: 2611 - DNA, 17 bp, Homo sapiens
tttagtttttaaaaaat

SEQ ID NO: 2612 - DNA, 17 bp, Homo sapiens
tctctgattagagaaaa

SEQ ID NO: 2613 - DNA, 17 bp, Homo sapiens
ctatttgaacaccaact

SEQ ID NO: 2614 - DNA, 17 bp, Homo sapiens
tgaagtacaacttttag

SEQ ID NO: 2615 - DNA, 17 bp, Homo sapiens
cttttaagctctcacca

SEQ ID NO: 2616 - DNA, 17 bp, Homo sapiens
tatagaattatatgcta

SEQ ID NO: 2617 - DNA, 17 bp, Homo sapiens
ggttttaatagatccaa

SEQ ID NO: 2618 - DNA, 17 bp, Homo sapiens
atacatttaacccttta

SEQ ID NO: 2619 - DNA, 17 bp, Homo sapiens
agcaacatgtttgctca

SEQ ID NO: 2620 - DNA, 17 bp, Homo sapiens
ttattgcacaagagaaa

SEQ ID NO: 2621 - DNA, 17 bp, Homo sapiens
taaaatgcaatagtatt

SEQ ID NO: 2622 - DNA, 17 bp, Homo sapiens
actgtacacgctaaaag

SEQ ID NO: 2623 - DNA, 17 bp, Homo sapiens
ctctgggcacaggcata

SEQ ID NO: 2624 - DNA, 17 bp, Homo sapiens
tgagctgggcctgcccg

SEQ ID NO: 2625 - DNA, 17 bp, Homo sapiens
tccccgggcggtgtgga

SEQ ID NO: 2626 - DNA, 17 bp, Homo sapiens
aggagtgctccgacgag

SEQ ID NO: 2627 - DNA, 17 bp, Homo sapiens
aaaggcgattgtctgga

SEQ ID NO: 2628 - DNA, 17 bp, Homo sapiens
gattgtctggagtctcc

SEQ ID NO: 2629 - DNA, 17 bp, Homo sapiens
ctttgagctgcctggag

SEQ ID NO: 2630 - DNA, 17 bp, Homo sapiens
ttgatgcgcttagagaa

SEQ ID NO: 2631 - DNA, 17 bp, Homo sapiens
gggctcagcgagctggg

SEQ ID NO: 2632 - DNA, 17 bp, Homo sapiens
ttttggacaggcccccc

SEQ ID NO: 2633 - DNA, 17 bp, Homo sapiens
tgcggtccgactcgccg

SEQ ID NO: 2634 - DNA, 17 bp, Homo sapiens
tcgctgaagtgctgcat

SEQ ID NO: 2635 - DNA, 17 bp, Homo sapiens
ggcagggcgcggctctc

SEQ ID NO: 2636 - DNA, 17 bp, Homo sapiens
ttgagcgcgctgctggc

SEQ ID NO: 2637 - DNA, 17 bp, Homo sapiens
gcctgggtgcacgcgtg

SEQ ID NO: 2638 - DNA, 17 bp, Homo sapiens
tgaaatttgaacgtctt

SEQ ID NO: 2639 - DNA, 17 bp, Homo sapiens
ggggctgggagggagga

SEQ ID NO: 2640 - DNA, 17 bp, Homo sapiens
ccctgccagctctctaa

SEQ ID NO: 2641 - DNA, 17 bp, Homo sapiens
gaaatccatggcgggag

SEQ ID NO: 2642 - DNA, 17 bp, Homo sapiens
ggcgctctatgcggtgg

SEQ ID NO: 2643 - DNA, 17 bp, Homo sapiens
ggccggaagcctctctc

SEQ ID NO: 2644 - DNA, 17 bp, Homo sapiens
gttattgtctgcaatat

SEQ ID NO: 2645 - DNA, 17 bp, Homo sapiens
gcacctagtcctgaagg

SEQ ID NO: 2646 - DNA, 17 bp, Homo sapiens
tgttcgctttctaagta

SEQ ID NO: 2647 - DNA, 17 bp, Homo sapiens
tcaaaatattctcaatg

SEQ ID NO: 2648 - DNA, 17 bp, Homo sapiens
ggaacatgaagctcccc

SEQ ID NO: 2649 - DNA, 17 bp, Homo sapiens
agctctgggcagcacct

SEQ ID NO: 2650 - DNA, 17 bp, Homo sapiens
catgtggaaggagacat

SEQ ID NO: 2651 - DNA, 17 bp, Homo sapiens
ttcctcctaatccataa

SEQ ID NO: 2652 - DNA, 17 bp, Homo sapiens
ctcaagccccatgtgca

SEQ ID NO: 2653 - DNA, 17 bp, Homo sapiens
acctcaagcaggactaa

SEQ ID NO: 2654 - DNA, 17 bp, Homo sapiens
aagattcggagagagca

SEQ ID NO: 2655 - DNA, 17 bp, Homo sapiens
tggcccaggaagaagct

SEQ ID NO: 2656 - DNA, 17 bp, Homo sapiens
tctgagctcccccttgg

SEQ ID NO: 2657 - DNA, 17 bp, Homo sapiens
cgatactcgccagtgct

SEQ ID NO: 2658 - DNA, 17 bp, Homo sapiens
ctccgcatgaagtaggc

SEQ ID NO: 2659 - DNA, 17 bp, Homo sapiens
cttctcaactaccaaat

SEQ ID NO: 2660 - DNA, 17 bp, Homo sapiens
gctatgtgttcctgttt

SEQ ID NO: 2661 - DNA, 17 bp, Homo sapiens
tcctctggcgtgacctg

SEQ ID NO: 2662 - DNA, 17 bp, Homo sapiens
gattggtgaaggggaag

SEQ ID NO: 2663 - DNA, 17 bp, Homo sapiens
tcgataaaaataagaat

SEQ ID NO: 2664 - DNA, 17 bp, Homo sapiens
catgatccccttctgga

SEQ ID NO: 2665 - DNA, 17 bp, Homo sapiens
tcacaccgccgcgcgcc

SEQ ID NO: 2666 - DNA, 17 bp, Homo sapiens
cgggcggacgacggctc

SEQ ID NO: 2667 - DNA, 17 bp, Homo sapiens
aaaagccatgacggctc

SEQ ID NO: 2668 - DNA, 17 bp, Homo sapiens
gaaaaatttaaaaatgc

SEQ ID NO: 2669 - DNA, 17 bp, Homo sapiens
aaaatttaaaaatgcat

SEQ ID NO: 2670 - DNA, 17 bp, Homo sapiens
gtttgccttgcttgcgg

SEQ ID NO: 2671 - DNA, 17 bp, Homo sapiens
gggcggacgacggctcg

SEQ ID NO: 2672 - DNA, 17 bp, Homo sapiens
tatcttcatcagtgcct

SEQ ID NO: 2673 - DNA, 17 bp, Homo sapiens
ccaaaataaattagaaa

SEQ ID NO: 2674 - DNA, 17 bp, Homo sapiens
gaacgtcaggagtctgg

SEQ ID NO: 2675 - DNA, 17 bp, Homo sapiens
caggagtctggatggac

SEQ ID NO: 2676 - DNA, 17 bp, Homo sapiens
ggagtctggatggacag

SEQ ID NO: 2677 - DNA, 17 bp, Homo sapiens
agtctggatggacagag

SEQ ID NO: 2678 - DNA, 17 bp, Homo sapiens
ggatggacagagacaca

SEQ ID NO: 2679 - DNA, 17 bp, Homo sapiens
ggaggagggaaggggaa

SEQ ID NO: 2680 - DNA, 17 bp, Homo sapiens
aggggaagctcacacca

SEQ ID NO: 2681 - DNA, 17 bp, Homo sapiens
gggaagctcacaccaat

SEQ ID NO: 2682 - DNA, 17 bp, Homo sapiens
gaagctcacaccaatgg

SEQ ID NO: 2683 - DNA, 17 bp, Homo sapiens
tggacacacatcagggg

SEQ ID NO: 2684 - DNA, 17 bp, Homo sapiens
ggacatgaaaaagagac

SEQ ID NO: 2685 - DNA, 17 bp, Homo sapiens
acgtgcgccctgctccc

SEQ ID NO: 2686 - DNA, 17 bp, Homo sapiens
gtgcgccctgctccccc

SEQ ID NO: 2687 - DNA, 17 bp, Homo sapiens
cgtccgcggagcccccc

SEQ ID NO: 2688 - DNA, 17 bp, Homo sapiens
tctctttttcatgtcca

SEQ ID NO: 2689 - DNA, 17 bp, Homo sapiens
cgtccgcacttgaactt

SEQ ID NO: 2690 - DNA, 17 bp, Homo sapiens
tattttggatgtcaaaa

SEQ ID NO: 2691 - DNA, 17 bp, Homo sapiens
cgccgccgccgccgccc

SEQ ID NO: 2692 - DNA, 17 bp, Homo sapiens
ccgccgccgcccgcccc

SEQ ID NO: 2693 - DNA, 17 bp, Homo sapiens
cgggaattctcgcgtaa

SEQ ID NO: 2694 - DNA, 17 bp, Homo sapiens
gagagcgcgcaggacta

SEQ ID NO: 2695 - DNA, 17 bp, Homo sapiens
attattactattattgg

SEQ ID NO: 2696 - DNA, 17 bp, Homo sapiens
cgggcggacgacggctc

SEQ ID NO: 2697 - DNA, 17 bp, Homo sapiens
aggagtctggatggaca

SEQ ID NO: 2698 - DNA, 17 bp, Homo sapiens
gagtctggatggacaga

SEQ ID NO: 2699 - DNA, 17 bp, Homo sapiens
aggggaggagggaaggg

SEQ ID NO: 2700 - DNA, 17 bp, Homo sapiens
ggaagctcacaccaatg

SEQ ID NO: 2701 - DNA, 17 bp, Homo sapiens
tcccccccacacacgcg

We claim:

1. A single-molecule guide RNA comprising:
a DNA-targeting segment and a protein-binding segment wherein the protein-binding segment comprises a tracrRNA set out in Supplementary Table S5.

2. The single-molecule guide RNA of claim 1 wherein the protein-binding segment comprises a CRISPR repeat set out in Supplementary Table S5 that is the cognate CRISPR repeat of the tracrRNA of the protein-binding segment.

3. The single-molecule guide RNA of claim 1 or 2 wherein the DNA-targeting segment further comprises RNA complementary to a protospacer-like sequence in a target DNA 5′ to a PAM sequence.

4. The single-molecule guide RNA of claim 3 wherein the tracrRNA and CRISPR repeat are respectively at least 80% identical to the C. jejuni tracrRNA and CRISPR repeat set out in Supplementary Table S5 and wherein the PAM sequence is NNNNACA.

5. The single-molecule guide RNA of claim 4 or 8 wherein the RNA complementary to a protospacer-like sequence is RNA complementary to the target sequences set out in one of SEQ ID NOs: 801-973, 1079-1222, 1313-1348, 1372-1415, 1444-1900, 2163-2482 or 2667-2686.

6. A single-molecule guide RNA comprising:
a DNA-targeting segment and a protein-binding segment, wherein the protein-binding segment comprises a tracrRNA at least 80% identical over at least 20 nucleotides to a tracrRNA set out in Supplementary Table S5.

7. A single-molecule guide RNA comprising:
a DNA-targeting segment and a protein-binding segment, wherein the protein-binding segment comprises a tracrRNA at least 80% identical over at least 20 nucleotides to a tracrRNA set out in Supplementary Table S5, a CRISPR repeat at least 80% identical to a CRISPR repeat set out in Supplementary Table S5, or both.

8. The single-molecule guide RNA of claim 7 wherein the tracrRNA and CRISPR repeat are respectively at least 80% identical to the C. jejuni tracrRNA and CRISPR repeat set out in Supplementary Table S5 and wherein the PAM sequence is NNNNACA.

9. The single-molecule guide RNA of claim 1 or 6 comprising a linker between the DNA-targeting segment and the protein-binding segment.

10. A DNA encoding a single-molecule guide RNA comprising:
a DNA-targeting segment and a protein-binding segment, wherein the protein-binding segment comprises a tracrRNA set out in Supplementary Table S5.

11. A DNA encoding a single-molecule guide RNA comprising:
a DNA-targeting segment and a protein-binding segment, wherein the protein-binding segment comprises a tracrRNA at least 80% identical over at least 20 nucleotides to a tracrRNA set out in Supplementary Table S5, a CRISPR repeat at least 80% identical to a CRISPR repeat set out in Supplementary Table S5, or both.

12. A vector comprising a DNA encoding a single-molecule guide RNA comprising:
a DNA-targeting segment and a protein-binding segment wherein the protein-binding segment comprises a tracrRNA set out in Supplementary Table S5.

13. A vector comprising a DNA encoding a single-molecule guide RNA comprising:
a DNA-targeting segment and a protein-binding segment, wherein the protein-binding segment comprises a tracrRNA at least 80% identical over at least 20 nucleotides to a tracrRNA set out in Supplementary Table S5, a CRISPR repeat at least 80% identical to a CRISPR repeat set out in Supplementary Table S5, or both.

14. A cell comprising a DNA encoding a single-molecule guide RNA comprising:
a DNA-targeting segment and a protein-binding segment, wherein the protein-binding segment comprises a tracrRNA set out in Supplementary Table S5.

15. A cell comprising a DNA encoding a single-molecule guide RNA comprising:
a DNA-targeting segment and a protein-binding segment, wherein the protein-binding segment comprises a tracrRNA at least 80% identical over at least 20 nucleotides to a tracrRNA set out in Supplementary Table S5, a CRISPR repeat at least 80% identical to a CRISPR repeat set out in Supplementary Table S5, or both.

16. A double-molecule guide RNA comprising:
a targeter-RNA and an activator-RNA complementary thereto, wherein the activator-RNA comprises a tracrRNA set out in Supplementary Table S5, and
wherein the guide RNA comprises a modified backbone, a non-natural internucleoside linkage, a nucleic acid mimetic, a modified sugar moiety, a base modification, a modification or sequence that provides for modified or regulated stability, a modification or sequence that provides for subcellular tracking, a modification or sequence that provides for tracking, or a modification or sequence that provides for a binding site for a protein or protein complex.

17. The double-molecule guide RNA of claim 16, wherein the targeter-RNA comprises a CRISPR repeat set out in Supplementary Table S5 that is the cognate CRISPR repeat of the tracrRNA of the protein-binding segment.

18. The double-molecule guide RNA of claim 16 or 17 wherein the targeter-RNA further comprises RNA complementary to a protospacer-like sequence in a target DNA 5′ to a PAM sequence.

19. The double-molecule guide RNA of claim 18 wherein the tracrRNA and CRISPR repeat are respectively at least 80% identical to the C. jejuni tracrRNA and CRISPR repeat set out in Supplementary Table S5 and wherein the PAM sequence is NNNNACA.

20. The double-molecule guide RNA of claim 19 or claim 23 wherein the RNA complementary to a protospacer-like sequence is RNA complementary to the target sequences set out in one of SEQ ID NOs: 801-973, 1079-1222, 1313-1348, 1372-1415, 1444-1900, 2163-2482 or 2667-2686.

21. A double-molecule guide RNA comprising:
a targeter-RNA and a activator-RNA, wherein the activator-RNA comprises a tracrRNA at least 80% identical over at least 20 nucleotides to a tracrRNA set out in Supplementary Table S5.

22. The double-molecule guide RNA of claim 21, wherein the targeter-RNA comprises a CRISPR repeat set out in Supplementary Table S5, the cognate CRISPR repeat of the tracrRNA of the activator-RNA set out in Supplementary Table S5, or a CRISPR repeat at least 80% identical to a CRISPR repeat set out in Supplementary Table S5.

23. The double-molecule guide RNA of claim 21 wherein the tracrRNA and CRISPR repeat are respectively at least 80% identical to the C. jejuni tracrRNA and CRISPR repeat set out in Supplementary Table S5 and wherein the PAM sequence is NNNNACA.

24. The double-molecule guide RNA of claim 16 or 21 comprising a linker between the targeter-RNA and the activator-RNA.

25. A DNA encoding a double-molecule guide RNA comprising:
a targeter-RNA and a activator-RNA complementary thereto, wherein the activator-RNA comprises a tracrRNA set out in Supplementary Table S5.

26. A DNA encoding a double-molecule guide RNA comprising:
a targeter-RNA and a activator-RNA complementary thereto, wherein the activator-RNA comprises a tracrRNA at least 80% identical over at least 20 nucleotides to a tracrRNA set out in Supplementary Table S5, a CRISPR repeat at least 80% identical to a CRISPR repeat set out in Supplementary Table S5, or both.

27. A vector comprising a DNA encoding a double-molecule guide RNA comprising:
a targeter-RNA and a activator-RNA complementary thereto, wherein the activator-RNA comprises a tracrRNA set out in Supplementary Table S5.

28. A vector comprising a DNA encoding a double-molecule guide RNA comprising:
a targeter-RNA and a activator-RNA complementary thereto, wherein the activator-RNA comprises a tracrRNA at least 80% identical over at least 20 nucleotides to a tracrRNA set out in Supplementary Table S5, a CRISPR repeat at least 80% identical to a CRISPR repeat set out in Supplementary Table S5, or both.

29. A cell comprising a DNA encoding a double-molecule guide RNA comprising:
a targeter-RNA and a activator-RNA complementary thereto, wherein the activator-RNA comprises a tracrRNA set out in Supplementary Table S5.

30. A cell comprising a DNA encoding a double-molecule guide RNA comprising:
a targeter-RNA and a activator-RNA complementary thereto, wherein the activator-RNA comprises a tracrRNA at least 80% identical over at least 20 nucleotides to a tracrRNA set out in Supplementary Table S5, a CRISPR repeat at least 80% identical to a CRISPR repeat set out in Supplementary Table S5, or both.

31. A method for manipulating DNA in a cell, comprising contacting the DNA with a Cas9 ortholog-guideRNA complex, wherein the complex comprises:
(a) a C. jejuni Cas9 endonuclease heterologous to the cell or an endonuclease with an activity portion at least 90% identical to the activity portion of the C. jejuni Cas9 endonuclease, and a guide RNA targeting the complex to a protospacer-like sequence in the DNA 5′ to the PAM sequence NNNNACA;
(b) a P. multocida Cas9 endonuclease heterologous to the cell or an endonuclease with an activity portion at least 90% identical to the activity portion of the P. multocida Cas9 endonuclease, and a guide RNA targeting the complex to a protospacer-like sequence in the DNA 5′ to the PAM sequence GNNNCNNA or NNNNC;
(c) an F. novicida Cas9 endonuclease heterologous to the cell or an endonuclease with an activity portion at least 90% identical to the activity portion of the F. novicida Cas9 endonuclease, and a guide RNA targeting the complex to a protospacer-like sequence in the DNA 5′ to the PAM sequence NG;
(d) an S. thermophilus** Cas9 endonuclease heterologous to the cell or an endonuclease with an activity portion at least 90% identical to the activity portion of the S. thermophilus** Cas9 endonuclease, and a guide RNA targeting the complex to a protospacer-like sequence in the DNA 5′ to the PAM sequence NNAAAAW;
(e) an L. innocua Cas9 endonuclease heterologous to the cell or an endonuclease with an activity portion at least 90% identical to the activity portion of the L. innocua Cas9 endonuclease, and a guide RNA targeting the complex to a protospacer-like sequence in the DNA 5′ to the PAM sequence NGG; or
(f) an S. dysgalactiae Cas9 endonuclease heterologous to the cell or an endonuclease with an activity portion at least 90% identical to the activity portion of the S. dysgalactiae Cas9 endonuclease, and a guide RNA targeting the complex to a protospacer-like sequence in the DNA 5′ to the PAM sequence NGG.

32. The method of claim 31 wherein the cell is a bacterial cell, a fungal cell, an archaea cell, a plant cell or an animal cell.

33. The method of claim 31 wherein the guide RNA is a single-molecule guide RNA.

34. The method of claim 31 wherein the guide RNA is a double-molecule guide RNA.

35. The method of claim 31 wherein the endonuclease is a nickase.

36. The method of claim 31 wherein the endonuclease comprises a mutation corresponding to S pyogenes E762A, HH983AA or D986A.

37. The method of claim 31 wherein the endonuclease is a dead mutant/DNA binding protein.

38. The method of claim 31 wherein the protospacer-like sequence targeted is in a CCR5, CXCR4, KRT5, KRT14, PLEC or COL7A1 gene.

39. The method of claim 31 wherein the protospacer-like sequence is in a chronic granulomatous disease (CGD)-related gene CYBA, CYBB, NCF1, NCF2 or NCF4.

40. The method of claim 31 wherein the protospacer-like sequence targeted is in, or is up to 1000 nucleotides upstream of, a gene encoding B-cell lymphoma/leukemia IIA (BCL11A) protein, an erythroid enhancer of BCL11A or a BCL11A binding site.

41. The method of claim 31 wherein the endonuclease and the guide RNA are introduced to the cell by the same or different recombinant vectors encoding the endonuclease and the guide RNA.

42. The method of claim 31 wherein at least one recombinant vector is a recombinant viral vector.

43. A recombinant vector encoding:
(a) a guide RNA, wherein the guide RNA comprises a DNA-targeting segment complementary to a protospacer-like sequence in the DNA 5′ to the PAM sequence NNNNACA; and
(b) s C. jejuni Cas9 endonuclease or an endonuclease with an activity portion at least 90% identical to the activity portion of the C. jejuni Cas9 endonuclease.

44. A recombinant vector encoding:
(a) a guide RNA, wherein the guide RNA comprises a DNA-targeting segment complementary to a protospacer-like sequence in the DNA 5′ to the PAM sequence GNNNCNNA or NNNNC; and
(b) a P. multocida Cas9 endonuclease or an endonuclease with an activity portion at least 90% identical to the activity portion the P. multocida Cas9 endonuclease.

45. A recombinant vector encoding:
(a) a guide RNA, wherein the guide RNA comprises a DNA-targeting segment complementary to a protospacer-like sequence in the DNA 5′ to the PAM sequence NG; and
(b) a F. novicida Cas9 endonuclease or an endonuclease with an activity portion at least 90% identical to the activity portion of the F. novicida Cas9 endonuclease.

46. A recombinant vector encoding:
(a) a guide RNA, wherein the guide RNA comprises a DNA-targeting segment complementary to a protospacer-like sequence in the DNA 5′ to the PAM sequence NNAAAAW; and
(b) a S. thermophilus** Cas9 endonuclease or an endonuclease with an activity portion at least 90% identical to the activity portion of the S. thermophilus** Cas9 endonuclease.

47. A recombinant vector encoding:
(a) a guide RNA, wherein the guide RNA comprises a DNA-targeting segment complementary to a protospacer-like sequence in the DNA 5′ to the PAM sequence NGG; and
(b) a L. innocua Cas9 endonuclease or an endonuclease with an activity portion at least 90% identical to the activity portion of the L. innocua Cas9 endonuclease.

48. A recombinant vector encoding:
(a) a guide RNA, wherein the guide RNA comprises a DNA-targeting segment complementary to a protospacer-like sequence in the DNA 5′ to the PAM sequence NGG; and
(b) a S. dysgalactiae Cas9 endonuclease or an endonuclease with an activity portion at least 90% identical to the activity portion of the S. dysgalactiae Cas9 endonuclease.

49. The recombinant vector of claim 43, 44, 45, 46, 47 or 48 wherein the recombinant vector is a recombinant viral vector.

50. A modified Cas9 endonuclease comprising one or more mutations corresponding to S. pyogenes mutation E762A, HH983AA or D986A.

51. The modified Cas 9 endonuclease of claim 50 further comprising one or more mutations corresponding to S. pyogenes mutation D10A, H840A, G12A, G17A, N854A, N863A, N982A or A984A.

52. A method for manipulating DNA in a cell, comprising contacting the DNA with a Cas9 ortholog-guide RNA complex, wherein the complex comprises:
(a) a Cas9 endonuclease heterologous to the cell and
(b) a cognate guide RNA of the Cas9 endonuclease comprising a tracrRNA set out in Supplementary Table S5 or a guide RNA comprising a tracrRNA at least 80% identical to a cognate tracrRNA set out in Supplementary Table S5 over at least 20 nucleotides.

53. The method of claim 52 wherein the cell is a bacterial cell, a fungal cell, an archaea cell, a plant cell or an animal cell.

54. The method of claim 52 wherein the guide RNA is a single-molecule guide RNA.

55. The method of claim 52 wherein the guide RNA is a double-molecule guide RNA.

56. The method of claim 52 wherein the endonuclease is a nickase.

57. The method of claim 52 wherein the endonuclease comprises a mutation corresponding to S pyogenes mutations E762, HH983AA or D986A.

58. The method of claim 52 wherein the endonuclease is a dead mutant/DNA binding protein.

59. The method of claim 52 wherein the protospacer-like sequence targeted is in a CCR5, CXCR4, KRT5, KRT14, PLEC or COL7A1 gene or a sequence up to 1000 nucleotides upstream of the gene.

60. The method of claim 52 wherein the protospacer-like sequence is in a chronic granulomatous disease (CGD)-related gene CYBA, CYBB, NCF1, NCF2 or NCF4 or a sequence up to 1000 nucleotides upstream of the gene.

61. The method of claim 52 wherein the protospacer-like sequence targeted is in, or is up to 1000 nucleotides upstream of, a gene encoding B-cell lymphoma/leukemia IIA (BCL11A) protein, an erythroid enhancer of BCL11A or a BCL11A binding site.

62. The method of claim 52 wherein the endonuclease and the guide RNA are introduced to the cell by the same or different recombinant vectors encoding the endonuclease and the guide RNA.

63. The method of claim 52 wherein at least one recombinant vector is a recombinant viral vector.
